United States Patent Application Publication US 2009/0172834 A1 - sequence listing, part 3

SEQ ID NO: 6229 - protein, 259 aa, Homo sapiens
MSKYKLIMLRHGEGAWNKENRFCSWVDQKLNSEGMEEARNCGKQLKALNFEFDLVFTSVLNRSIHTAWLILEELGQEWVPVESSWRLNERHYGALIGLNREQMALNHGEEQVRLWRRSYNVTPPPIEESHPYYQEIYNDRRYKVCDVPLDQLPRSESLKDVLERLLPYWNERIAPEVLRGKTILISAHGNSSRALLKHLEGISDEDIINITLPTGVPILLELDENLRAVGPHQFLGDQEAIQAAIKKVEDQGKVKQAKK

SEQ ID NO: 6230 - DNA, 765 bp, Homo sapiens
  CDS (1)..(765)
atggccgcctacaaactggtgctgatccggcacggcgagagcgcatggaacctggagaaccgcttcagcggctggtacgacgccgacctgagcccggcgggccacgaggaggcgaagcgcggcgggcaggcgctacgagatgctggctatgagtttgacatctgcttcacctcagtgcagaagagagcgatccggaccctctggacagtgctagatgccattgatcagatgtggctgccagtggtgaggacttggcgcctcaatgagcggcactatgggggtctaaccggtctcaataaagcagaaactgctgcaaagcatggtgaggcccaggtgaagatctggaggcgctcctatgatgtcccaccacctccgatggagcccgaccatcctttctacagcaacatcagtaaggatcgcaggtatgcagacctcacagaagatcagctaccctcctgtgagagtctgaaggatactattgccagagctctgcccttctggaatgaagaaatagttccccagatcaaggaggggaaacgtgtactgattgcagcccatggcaacagcctccggggcattgtcaagcatctggagggtctctctgaagaggctatcatggagctgaacctgccgactggtattcccattgtctatgaattggacaagaacttgaagcctatcaagcccatgcagtttctgggggatgaagagacggtgcgcaaagccatggaagctgtggctgcccagggcaaggccaagaagtga

SEQ ID NO: 6231 - protein, 254 aa, Homo sapiens
MAAYKLVLIRHGESAWNLENRFSGWYDADLSPAGHEEAKRGGQALRDAGYEFDICFTSVQKRAIRTLWTVLDAIDQMWLPVVRTWRLNERHYGGLTGLNKAETAAKHGEAQVKIWRRSYDVPPPPMEPDHPFYSNISKDRRYADLTEDQLPSCESLKDTIARALPFWNEEIVPQIKEGKRVLIAAHGNSLRGIVKHLEGLSEEAIMELNLPTGIPIVYELDKNLKPIKPMQFLGDEETVRKAMEAVAAQGKAKK

SEQ ID NO: 6232 - DNA, 744 bp, Saccharomyces cerevisiae
  CDS (1)..(744)
atgccaaagttagttttagttagacacggtcaatccgaatggaacgaaaagaacttattcaccggttgggttgatgttaaattgtctgccaagggtcaacaagaagccgctagagccggtgaattgttgaaggaaaagaaggtctacccagacgtcttgtacacttccaagttgtccagagctatccaaactgctaacattgctttggaaaaggctgacagattatggattccagtcaacagatcctggagattgaacgaaagacattacggtgacttacaaggtaaggacaaggctgaaactttgaagaagttcggtgaagaaaaattcaacacctacagaagatccttcgatgttccacctcccccaatcgacgcttcttctccattctctcaaaagggtgatgaaagatacaagtacgttgacccaaatgtcttgccagaaactgaatctttggctttggtcattgacagattgttgccatactggcaagatgtcattgccaaggacttgttgagtggtaagaccgtcatgatcgccgctcacggtaactccttgagaggtttggttaagcacttggaaggtatctctgatgctgacattgctaagttgaacatcccaactggtattccattggtcttcgaattggacgaaaacttgaagccatctaagccatcttactacttggacccagaagctgccgctgctggtgccgctgctgttgccaaccaaggtaagaaataa

SEQ ID NO: 6233 - protein, 247 aa, Saccharomyces cerevisiae
MPKLVLVRHGQSEWNEKNLFTGWVDVKLSAKGQQEAARAGELLKEKKVYPDVLYTSKLSRAIQTANIALEKADRLWIPVNRSWRLNERHYGDLQGKDKAETLKKFGEEKFNTYRRSFDVPPPPIDASSPFSQKGDERYKYVDPNVLPETESLALVIDRLLPYWQDVIAKDLLSGKTVMIAAHGNSLRGLVKHLEGISDADIAKLNIPTGIPLVFELDENLKPSKPSYYLDPEAAAAGAAAVANQGKK

SEQ ID NO: 6234 - DNA, 780 bp, Mus musculus
  CDS (1)..(780)
atgtccaagcacaaacttattatactaagacatggagagggccaatggaataaggagaaccgattctgtagttgggtggaccagaaacttaacaacgacggactggaggaggctcggaactgtgggaggcagctcaaagctctcaacttcgagtttgatcttgtcttcacatccatccttaacaggtccattcacacagcctggctgatcctggaagagctggggcaggagtgggtgcctgtggagagctcctggcgtctgaatgagcgtcactatggagccttgattggcctcaacagggagaaaatggctttgaatcatggtgaagagcaggtaaggctctggaggagaagctacaacgtgaccccacctcctatagaggagtctcatccctacttccacgagatctacagtgaccggaggtacaaagtgtgcgatgtgcccttggatcaactgccacgttcagaaagcttgaaggatgttctggagagacttcttccctactggaaggaaaggattgctccggaaatcttaaagggcaaaagcattctgatatctgctcacgggaatagcagtagagctctcctgaaacatctggaaggtatctcagacgaggatattatcaacatcactctgcccactggagttccgattctgctggagttggatgagaacctgcgtgccgttgggcctcaccagttcctgggcaaccaggaggccatccaggcagccattaagaaagtggatgatcaagggaaagtgaaacaaggcaaacaataa

SEQ ID NO: 6235 - protein, 259 aa, Mus musculus
MSKHKLIILRHGEGQWNKENRFCSWVDQKLNNDGLEEARNCGRQLKALNFEFDLVFTSILNRSIHTAWLILEELGQEWVPVESSWRLNERHYGALIGLNREKMALNHGEEQVRLWRRSYNVTPPPIEESHPYFHEIYSDRRYKVCDVPLDQLPRSESLKDVLERLLPYWKERIAPEILKGKSILISAHGNSSRALLKHLEGISDEDIINITLPTGVPILLELDENLRAVGPHQFLGNQEAIQAAIKKVDDQGKVKQGKQ

SEQ ID NO: 6236 - DNA, 762 bp, Rattus norvegicus
  CDS (1)..(762)
atggccacccaccgcctagtaatggtccgccacggtgagagctcatggaaccaagagaaccgtttctgtggctggtttgatgcagaactgagtgagaagggggcagaggaggccaagcggggggccactgccatcaaagatgccaagatagagtttgacatctgctacacgtcggtgctgaagcgggctatccgcaccctttggaccatcctggatgttacggaccaaatgtgggtgcccgtggtgcgcacctggcgcctcaatgagcggcactatggaggtctcacgggcctcaataaggctgagacggctgcaaagcatggggaggagcaggtgaagatctggaggcgttcctttgacaccccgccaccacctatggacgagaaacacaactactacgcctccatcagcaaggatcggcgctatgcaggcttgaagcctgaggagctgcctacctgtgagagcctcaaggacaccattgcccgggctctgcccttctggaatgaggagatcgcacctaagattaaggctggcaagagagtccttattgcagcccatgggaacagccttcgaggcattgtcaagcatctggaagggatgtcagaccaggccatcatggaactgaatctgcccaccggaatccccattgtctatgagctgaaccaggagctgaagcccaccaagcccatgaggttcctgggagacgaagagacagttcggaaggccatggaggctgtggctgcccagggaaaggcaaagtga

SEQ ID NO: 6237 - protein, 253 aa, Rattus norvegicus
MATHRLVMVRHGESSWNQENRFCGWFDAELSEKGAEEAKRGATAIKDAKIEFDICYTSVLKRAIRTLWTILDVTDQMWVPVVRTWRLNERHYGGLTGLNKAETAAKHGEEQVKIWRRSFDTPPPPMDEKHNYYASISKDRRYAGLKPEELPTCESLKDTIARALPFWNEEIAPKIKAGKRVLIAAHGNSLRGIVKHLEGMSDQAIMELNLPTGIPIVYELNQELKPTKPMRFLGDEETVRKAMEAVAAQGKAK

SEQ ID NO: 6238 - DNA, 762 bp, Mus musculus
  CDS (1)..(762)
atgaccacccaccgcctagtaatggttcgccacggtgagagcttatggaaccaagagaaccgtttctgtggctggtttgatgcagagctgagtgagaagggagcagaggaggccaagcggggggccaccgctatcaaagatgccaagatagagtttgacatctgctacacgtcggtgctgaagcgggcaatccgcaccctttggaccatcctggatgttacggaccaaatgtgggtgcccgtggtgcgtacctggcgcctcaatgagcggcactatggtggcctcacaggcctcaataaggctgagacggctgcaaagcacggggaggagcaggtgaagatctggaggcgttcctttgacaccccaccaccacccatggatgagaaacacaactactacacctccatcagcaaggaccgccgctatgcaggcttgaagcctgaggagctgcctacctgtgaaagtctcaaggacaccattgcccgggccttgcccttctggaatgaggagatcgcacctaagattaaggctggccagagagtgcttattgcagcccatgggaacagccttcggggcattgtgaaacatctggaagggatgtccgaccaggccatcatggagctgaacctgcccactggaatccccattgtgtatgagctggaccagaacctgaagcccaccaagcccatgaggttcctgggagacgaagagacggttcggaaggccatggaagctgttgctgcccagggaaaggcgaagtga

SEQ ID NO: 6239 - protein, 253 aa, Mus musculus
MTTHRLVMVRHGESLWNQENRFCGWFDAELSEKGAEEAKRGATAIKDAKIEFDICYTSVLKRAIRTLWTILDVTDQMWVPVVRTWRLNERHYGGLTGLNKAETAAKHGEEQVKIWRRSFDTPPPPMDEKHNYYTSISKDRRYAGLKPEELPTCESLKDTIARALPFWNEEIAPKIKAGQRVLIAAHGNSLRGIVKHLEGMSDQAIMELNLPTGIPIVYELDQNLKPTKPMRFLGDEETVRKAMEAVAAQGKAK

SEQ ID NO: 6240 - DNA, 765 bp, Mus musculus
  CDS (1)..(765)
atggctgcctacaagctggtgctgatccggcatggcgagagcgcctggaacctggagaaccgcttcagcggctggtacgacgccgacctgagcccggcaggccacgaggaggcgaagcgcggccggcaggcgttgcgagatgctggctatgaatttgacatctgcttcacctctgtgcagaagagagcaatccagaccctctggacagtcctggatgccattgaccagatgtggttgccagtggtcaggacttggcgcctcaatgagcgacactatggcggtctgacaggtctcaacaaagcagaaactgctgctaagcatggtgaggcccaggtaaagatctggagacgatcttatgatgtcccaccgcctcccatggagcctgatcaccccttctacagcaacatcagcaaggatcgcaggtacgcagaccttactgaagaccagcttcccttctgtgagagcctgaaggacactattgccagagcactgcccttctggaatgaagaaattgtcccccagatcatagaggggaaaagggtcttgattgccgcccacggcaacagccttcggggcatcgttatgcatgtggagggtctctcagaagaggccatcatggagctgaacctgcccacgggcatccctatcgtctatgaactggacaagaacttgaagcccatcaagcccatgcagttcctgggagacgaggagaccgtgcgcaaagccatggaagctgtggctgctcagggcaaggtgaagaagtga

SEQ ID NO: 6241 - protein, 254 aa, Mus musculus
MAAYKLVLIRHGESAWNLENRFSGWYDADLSPAGHEEAKRGRQALRDAGYEFDICFTSVQKRAIQTLWTVLDAIDQMWLPVVRTWRLNERHYGGLTGLNKAETAAKHGEAQVKIWRRSYDVPPPPMEPDHPFYSNISKDRRYADLTEDQLPFCESLKDTIARALPFWNEEIVPQIIEGKRVLIAAHGNSLRGIVMHVEGLSEEAIMELNLPTGIPIVYELDKNLKPIKPMQFLGDEETVRKAMEAVAAQGKVKK

SEQ ID NO: 6242 - DNA, 999 bp, Arabidopsis thaliana
  CDS (1)..(999)
atggctacttctacgactatgtctcatcaagcgattgggtctgttgtctctcaaagaccattcaaagcttctcagtttctaaaggagcctttgaataatgtaccaatgaaattcagacaaaaaagattcaagattgaagcaactgcttctcagatatctgtcgttgacaacactttcttgtctccgtctccttccaagaacaaaccacatgaatctaagaagaaatcaaatgaagcagctttgatattgattaggcatggagaatcgttatggaatgagaagaatttgttcacgggttgtgttgatgtgccattgactcagaaaggtgttggagaagctattgaagctgggaagaagattagtaacattcctgtagatttgattttcacttcttctttaatccgtgctcagatgactgcaatgcttgccatgactcagcatcgtcgcaagaaggttccaatcatcttgcacaacgagagtgtaaaggcgaaaacttggagtcatgttttcagcgaagaaactagaaaacaatctatcccggttatagcggcttggcaactgaatgagagaatgtatggagagttgcagggtttgaacaagaaagaaacagcggaaagatacgggacacaacaagttcacgaatggcgcaggagttacgaaattcctcctccgaaaggcgagagcttggagatgtgtgctgagagagcagtggcttattttgaagacaatatcaaaccagagcttgcatctggaaacaatgtaatgattgctgctcacgggaactcattgagatctatcattatgtatcttgacgatttaacttctcaggaggttacaactctagacctgtccacaggtgtaccattgctctacatcttcaaagaaggcaagttcatgaaacgaggaagccccgtcggttctactgaagctggtgtctatgcttatacaaagagattggcacaatacagagagaagcttgatgcggcggcgaccatttaa

SEQ ID NO: 6243 - protein, 332 aa, Arabidopsis thaliana
MATSTTMSHQAIGSVVSQRPFKASQFLKEPLNNVPMKFRQKRFKIEATASQISVVDNTFLSPSPSKNKPHESKKKSNEAALILIRHGESLWNEKNLFTGCVDVPLTQKGVGEAIEAGKKISNIPVDLIFTSSLIRAQMTAMLAMTQHRRKKVPIILHNESVKAKTWSHVFSEETRKQSIPVIAAWQLNERMYGELQGLNKKETAERYGTQQVHEWRRSYEIPPPKGESLEMCAERAVAYFEDNIKPELASGNNVMIAAHGNSLRSIIMYLDDLTSQEVTTLDLSTGVPLLYIFKEGKFMKRGSPVGSTEAGVYAYTKRLAQYREKLDAAATI

SEQ ID NO: 6244 - DNA, 762 bp, Borrelia burgdorferi B31
  CDS (1)..(762): transl_table=11
atgctaggagattttatgtataaattagttttagtaagacacggagagagtgagtggaataaagaaaatctttttactggttggacagatgttaaactttctgacaagggtatcgatgaggctgttgaggcgggtttgcttctcaaacaagaaggctattcttttgatattgcttttagttctttgttgtcaagagctaatgacactttaaatattattttgcgagaattagggcaatcttatattagtgtaaaaaaaacctggagattaaatgaaaggcactatggagctttgcaaggtttaaataagtcagaaacagctgcaaaatatggggaagataaggttttaatttggagacgtagttatgatgtgcccccaatgtctttggatgagtctgatgatcgtcatcccataaaagatccaagatataaacatatccccaaaagggaacttccttcaacagagtgccttaaagatactgttgcaagagttattccttattggactgatgagattgcaaaagaagttcttgaaggtaaaaaagttattgttgctgctcacggtaattctttaagagcgcttgttaaatattttgacaatttaagtgaagaagatgttttaaagcttaacattcccacaggcattcctttagtttacgaattagataaagatttaaatcccattaaacattactatctaggtgatgagagcaaaattaaaaaggcaatggaatctgttgctagtcaaggaaagttaaagtaa

SEQ ID NO: 6245 - protein, 253 aa, Borrelia burgdorferi B31
MLGDFMYKLVLVRHGESEWNKENLFTGWTDVKLSDKGIDEAVEAGLLLKQEGYSFDIAFSSLLSRANDTLNIILRELGQSYISVKKTWRLNERHYGALQGLNKSETAAKYGEDKVLIWRRSYDVPPMSLDESDDRHPIKDPRYKHIPKRELPSTECLKDTVARVIPYWTDEIAKEVLEGKKVIVAAHGNSLRALVKYFDNLSEEDVLKLNIPTGIPLVYELDKDLNPIKHYYLGDESKIKKAMESVASQGKLK

SEQ ID NO: 6246 - DNA, 687 bp, Chlamydophila pneumoniae J138
  CDS (1)..(687): transl_table=11
atggctcttcttattttattacgtcatggacaatctgtatggaatgaaaaaaatttattttctggatgggtagacattcctttaagccaacagggaattgaagaggctttttccgcaggaagagctattcaaaatttgcctatagactgcatctttacctctaccttagtacgtagtctgatgaccgccttactcgccatgacaaatcatcactctaagaagatcccctatattgttcatgaagatcccaaagcaaaagagatgtcgaggatctacagtgcggaagaagaaaacaatatgattcctctctatcaatctagtgccctcaacgaaagaatgtacggcgaacttcaaggaaaaaataaaaaacaaacagccgaacagttcggagaagagcgggtcaagctgtggaggcgcagctacaaaacagctcctcctcagggagaaagcctctatgatacgaaacaaaggaccttgccttactttgaaaaaaatattttgcctcaactgcaacatggaaaaaacgtttttgtttctgcgcacggaaattccttacgctctttgattatggatctagaaaaattaagtgaggaagaggtactatctttagaattaccgacgggaaaaccagttgtatatcaatggaaaaaccacaaaatcgaaaagcacccagaattttttggttaa

SEQ ID NO: 6247 - protein, 228 aa, Chlamydophila pneumoniae J138
MALLILLRHGQSVWNEKNLFSGWVDIPLSQQGIEEAFSAGRAIQNLPIDCIFTSTLVRSLMTALLAMTNHHSKKIPYIVHEDPKAKEMSRIYSAEEENNMIPLYQSSALNERMYGELQGKNKKQTAEQFGEERVKLWRRSYKTAPPQGESLYDTKQRTLPYFEKNILPQLQHGKNVFVSAHGNSLRSLIMDLEKLSEEEVLSLELPTGKPVVYQWKNHKIEKHPEFFG

SEQ ID NO: 6248 - DNA, 765 bp, Rattus norvegicus
  CDS (1)..(765)
atggctgcctacaagctggtgctgatccggcatggcgagagcgcctggaacctggagaaccgcttcagcggctggtacgatgccgacctgagcccagcgggccacgaggaggcgaagcgcggcgggcaggcgttgcgagatgctggctatgagtttgacatcgtcttcacctctgtgcagaagagagcaatccgcaccctctggacagtcctggatgccattgaccagatgtggttgccagtggtacggacctggcgtctcaatgagcgacactatgggggactaacaggtctcaataaagcagagactgctgctaagcatggtgaggcacaggtaaagatctggagacgatcttacgatgtcccgccacctccaatggagcctgatcatcccttctacagcaacatcagcaaggaccgcaggtacgcagaccttactgaggaccagctaccctcctgtgagagcctgaaggatactattgccagggcactgcccttctggaatgaagaaattgttccccagatcaaggaggggaaaggggtcttgattcctgcccatggcaacagctacgggggcattgtcaagcatctggagggtctgtcagaagaggccatcatggagctgaacctgccaactggtatacccatcgtctatgaactggacaagaacttgaagcccatcaagcccatgcagtctctgggagatgaagagacggtgcgtaaagccatggaagctgtggctgctcagggcaaggtgaagaagtga

SEQ ID NO: 6249 - protein, 254 aa, Rattus norvegicus
MAAYKLVLIRHGESAWNLENRFSGWYDADLSPAGHEEAKRGGQALRDAGYEFDIVFTSVQKRAIRTLWTVLDAIDQMWLPVVRTWRLNERHYGGLTGLNKAETAAKHGEAQVKIWRRSYDVPPPPMEPDHPFYSNISKDRRYADLTEDQLPSCESLKDTIARALPFWNEEIVPQIKEGKGVLIPAHGNSYGGIVKHLEGLSEEAIMELNLPTGIPIVYELDKNLKPIKPMQSLGDEETVRKAMEAVAAQGKVKK

SEQ ID NO: 6250 - DNA, 753 bp, Salmonella typhimurium LT2
  CDS (1)..(753): transl_table=11
atggctgtaactaagctggttctggtacgtcacggtgaaagtcaatggaacaaagagaaccgtttcaccggctggtatgatgttgacctgtctgaaaaaggcgtaagcgaagcaaaagcagcgggtaaactgctaaaagaagaaggtttcagctttgattttgcctacacttccgtactgaaacgcgctatccatacgctgtggaacgtactggatgaactggatcaggcgtggctgccggtggaaaaatcctggaaactcaatgaacgtcactatggcgcgttgcaggggctgaataaagcggaaacggcagaaaaatatggtgacgagcaggttaaacagtggcgccgcggttttgccgtgacgccgccggaactgaccaaagatgatgagcgttatccgggtcacgatccacgttatgccaaactgagcgagaaagagctgccgttgaccgaaagtctggcgctgaccatcgaccgcgttattccttactggaacgacaccatcctgccgcgtatgaagagcggtgagcgcgtgatcatcgccgctcacggtaactcattgcgtgcgctggtgaaatacctggataacatgagtgaagatgagatccttgagttaaacatcccgaccggcgtgccgctggtgtatgagttcgacgaaaacttcaagccgctcaaacattactatctgggcaacgctgacgaaatcgccgcgaaagcggctgccgtggcgaatcagggtaaagcgaagtaa

SEQ ID NO: 6251 - protein, 250 aa, Salmonella typhimurium LT2
MAVTKLVLVRHGESQWNKENRFTGWYDVDLSEKGVSEAKAAGKLLKEEGFSFDFAYTSVLKRAIHTLWNVLDELDQAWLPVEKSWKLNERHYGALQGLNKAETAEKYGDEQVKQWRRGFAVTPPELTKDDERYPGHDPRYAKLSEKELPLTESLALTIDRVIPYWNDTILPRMKSGERVIIAAHGNSLRALVKYLDNMSEDEILELNIPTGVPLVYEFDENFKPLKHYYLGNADEIAAKAAAVANQGKAK

SEQ ID NO: 6252 - DNA, 804 bp, Ralstonia solanacearum GMI1000
  CDS (1)..(804): transl_table=11
atgacgcagcgcgtcccggccaccgcgcaggttttctcacttctcatcatggcagtcatgcacaagctcgtcctcatccgccacggcgaatcgacgtggaacctcgaaaaccgcttcaccggctgggtcgacgtcgacctgaccgacaccggcatcgcccaggcccgccagggcggccgcctgctgcgcgaagccggcttcaccttcgacctggcctacacctcggtgctcaagcgcgccatccgcacactgtggcacgtgcaggatgaaatggacctgatgtggatcccgacccgcaccgaatggcgcctgaacgagcgccactatggcggcctgtcgggtctgaacaaggccgagaccgccgcccagtacggcgaccagcaggtgctggtctggcgccgcagctacgacacgccgccgcccgcgctggaagccggcgacgagcgcgacgcgtatggcaacccgcgctatgcgggcctgccgcgcgaacaggtgccgctcaccgaatgcctgaaggacaccgtggcgcgcgtgctgccgctgtgggaaacgtcgatcgccccggacatcaagagcggcaagcgcgtcgtgatcgccgcgcacggcaacagcatccgcgccctggtgaagtacctcgacaacatctcggacgacgacatcgtcggcctgaacatccccaacggcacgccgctcgtctacgaactggacgccaacctgaagcccatccgccattactatctcggcgaccaggaagcgatcgccgcgtcgctcgccgccgtggctggccagggcaaggcgaaataa

SEQ ID NO: 6253 - protein, 267 aa, Ralstonia solanacearum GMI1000
MTQRVPATAQVFSLLIMAVMHKLVLIRHGESTWNLENRFTGWVDVDLTDTGIAQARQGGRLLREAGFTFDLAYTSVLKRAIRTLWHVQDEMDLMWIPTRTEWRLNERHYGGLSGLNKAETAAQYGDQQVLVWRRSYDTPPPALEAGDERDAYGNPRYAGLPREQVPLTECLKDTVARVLPLWETSIAPDIKSGKRVVIAAHGNSIRALVKYLDNISDDDIVGLNIPNGTPLVYELDANLKPIRHYYLGDQEAIAASLAAVAGQGKAK

SEQ ID NO: 6254 - DNA, 768 bp, Drosophila melanogaster
  CDS (1)..(768)
atgggcggcaagtacaagatcgtgatggtgcgccacggcgagtccgagtggaaccagaagaatcagttctgcggctggtacgacgccaacctcagcgaaaagggtcaggaggaggccctagccgccggcaaggccgtcaaggatgccggcctggagttcgatgtggcccacacctcggtgctgacccgcgcccaggtgacgctggccagcatcctgaaggccagtggccacaaggagatccccatccagaagacttggcgcctgaacgagcgccactacggtggactcactggcctgaacaaggccgagaccgccgccaagtacggcgaggcccaggtgcagatctggcgtcgcagcttcgacaccccgccaccaccgatggagccgggccatccgtactacgagaacatcgtcaaggatccccgctacgccgagggtcccaagcccgaggagttcccccagttcgagtccctcaagctgaccatcgaacgcacactgccctactggaacgacgtcatcattccccagatgaaggagggcaagcgcatcctgatcgctgcccacggcaacagcctccgtggcatcgtcaagcatttagacaacctttctgaggacgccatcatggccctaaatctgcccacgggcattccgttcgtctacgagctggacgagaacttcaagccggtggtgtccatgcagttcctcggcgacgaggagaccgtgaagaaggccatcgaggctgtggccgcccagggcaaggccaagtaa

SEQ ID NO: 6255 - protein, 255 aa, Drosophila melanogaster
MGGKYKIVMVRHGESEWNQKNQFCGWYDANLSEKGQEEALAAGKAVKDAGLEFDVAHTSVLTRAQVTLASILKASGHKEIPIQKTWRLNERHYGGLTGLNKAETAAKYGEAQVQIWRRSFDTPPPPMEPGHPYYENIVKDPRYAEGPKPEEFPQFESLKLTIERTLPYWNDVIIPQMKEGKRILIAAHGNSLRGIVKHLDNLSEDAIMALNLPTGIPFVYELDENFKPVVSMQFLGDEETVKKAIEAVAAQGKAK

SEQ ID NO: 6256 - DNA, 654 bp, Brucella melitensis 16M
  CDS (1)..(654): transl_table=11
atgactgattcttcccaccaacggagtactgcgatgtctcgtaccctcgtcctggtccgccatggccaaagcgaatggaacctcaagaacctctttaccggctggcgtgatccgggcctcaccgagcagggccatgcggaagccaaggccgcaggccaacgcctcaaggcagccggcctgaagttcgacattgcctacacctccgccctttcccgcgcgcaagttacctgccagcacattctcgacgagcttggccagccgggccttgaaaccatccgcgaccaggccctgaacgagcgcgactatggcgatctctccggtctcaacaaggatgacgcccgcgcaaagtggggtgaggaacaggttcacatctggcgccgttcctatgacgtcccgcctccgggcggcgaaagcctgaaggacaccggcgcgcgcgtctggccctattaccttcacaccatccagccacatgtgctgcgcgaggagaccgttctggtcgccgcccatggcaattcgctgcgcgcactcatcatggcgctcgagggcctgacaccagaacagattctcaagcaggaactcaacaccggcgttccgatcatctaccggctcaatgccgattcgacggtcgcctcgaaggaaatcctcagcgcctga

SEQ ID NO: 6257 - protein, 217 aa, Brucella melitensis 16M
MTDSSHQRSTAMSRTLVLVRHGQSEWNLKNLFTGWRDPGLTEQGHAEAKAAGQRLKAAGLKFDIAYTSALSRAQVTCQHILDELGQPGLETIRDQALNERDYGDLSGLNKDDARAKWGEEQVHIWRRSYDVPPPGGESLKDTGARVWPYYLHTIQPHVLREETVLVAAHGNSLRALIMALEGLTPEQILKQELNTGVPIIYRLNADSTVASKEILSA

SEQ ID NO: 6258 - DNA, 1005 bp, Arabidopsis thaliana
  CDS (1)..(1005)
atggctactgctacgtctcaccaatcagtcgtttcatttgcttctctccggtcttctccttcttctacaatctctcaatgtggattcaagatcgattcttcactgagctttacatcgaaaaagacaaacttttgcaagattaaagcaatggcatcatcagtttcttatgacaacactctcttgtctccttccaagacaatccctgacaattctcaaaagaaatcaaatgaagcagctttgatattgattaggcatggagaatctttatggaacgagaagaatctttttactggttgtgttgatgtgccattgactgagaaaggtgttgaagaagctattgaagcagggaagaggattagtaacattcctgttgatgttatctttacatcttctttgattcgtgctcagatgactgcaatgcttgctatgattcaacaccgtcgtaagaaggtaccgatcatcttgcacgatgaaagcgaacaggcgaaaacttggagtcaagtttttagtgatgagactaaaaaccaatccattcctgtcatacctgcttggcagctcaatgaaagaatgtatggagaattacaaggtcttaacaagcaagaaacagccgagagatatgggaaagagcaagttcacgaatggcgtaggagttatgatattcctcctcccaaaggagagagtttggagatgtgtgctgagagagcagtagcttattttcaggacaatatcgaaccgaagcttgcagctggaaagaacgtaatgatagctgctcacgggaactcgctgcggtctatcattatgtatcttgacaaattgacttgccaggaggtgataagtctagagctatcgacaggtatacctcttctctacatattcaaagaaggcaaattcatgaagcggggaagcccggttggtccaacagaagctggtgtttatgcttataccaagagattggctcaatacagacagaagctagaggacgatagtgaagtactctgtgcctga

SEQ ID NO: 6259 - protein, 334 aa, Arabidopsis thaliana
MATATSHQSVVSFASLRSSPSSTISQCGFKIDSSLSFTSKKTNFCKIKAMASSVSYDNTLLSPSKTIPDNSQKKSNEAALILIRHGESLWNEKNLFTGCVDVPLTEKGVEEAIEAGKRISNIPVDVIFTSSLIRAQMTAMLAMIQHRRKKVPIILHDESEQAKTWSQVFSDETKNQSIPVIPAWQLNERMYGELQGLNKQETAERYGKEQVHEWRRSYDIPPPKGESLEMCAERAVAYFQDNIEPKLAAGKNVMIAAHGNSLRSIIMYLDKLTCQEVISLELSTGIPLLYIFKEGKFMKRGSPVGPTEAGVYAYTKRLAQYRQKLEDDSEVLCA

SEQ ID NO: 6260 - DNA, 762 bp, Streptomyces coelicolor A3(2)
  CDS (1)..(762): transl_table=11
atggccgacgcaccgtacaagctgatcctcctccgccacggcgagagcgagtggaacgagaagaacctgttcaccggctgggtggacgtcaacctcaccccgaagggcgagaaggaggcgacgcgcggcggcgagctgctcaaggacgccggcctgctgcccgacgtggtccacacgtccgtccagaagcgcgcgatccgcacggcccagctcgcgctggaggccgccgaccgccactggatcccggtccaccgccactggcgcctgaacgagcgccactacggcgccctccagggcaaggacaaggcccagaccctcgccgagttcggcgaggagcagttcatgctgtggcgccgctcctacgacaccccgccgcccgcgctggaccgcgacgccgagtactcccagttctccgacccgcgttacgcgatgctcccgccggagctgcgcccgcagacggagtgcctgaaggacgtcgtcggccggatgctcccgtactggttcgacgcgatcgtccccgacctcctcaccggccgcacggtcctggtggcggcgcacggcaactccctccgcgccctcgtcaagcacctcgacggcatctccgacgccgacatcgcgggcctgaacatcccgacgggcatcccgctctcgtacgaactcaacgccgagttcaagcccctgaacccgggcggcacgtacctcgacccggacgcggccgcggcggcgatcgaggccgtgaagaaccagggcaagaagaagtaa

SEQ ID NO: 6261 - protein, 253 aa, Streptomyces coelicolor A3(2)
MADAPYKLILLRHGESEWNEKNLFTGWVDVNLTPKGEKEATRGGELLKDAGLLPDVVHTSVQKRAIRTAQLALEAADRHWIPVHRHWRLNERHYGALQGKDKAQTLAEFGEEQFMLWRRSYDTPPPALDRDAEYSQFSDPRYAMLPPELRPQTECLKDVVGRMLPYWFDAIVPDLLTGRTVLVAAHGNSLRALVKHLDGISDADIAGLNIPTGIPLSYELNAEFKPLNPGGTYLDPDAAAAAIEAVKNQGKKK

SEQ ID NO: 6262 - DNA, 804 bp, Drosophila melanogaster
  CDS (1)..(804)
atggttttcttcaagttcttgaagagcaaactctcccaatttatgacgaaaacaaatcgcttggtgattttgaggcatggcgaaagtgatttcaacattgagaacaaattctgcggttggcatgatgcgccattgagtgaattcggcgtccaggaggccctgactgtggcgattcccgcgctcgtccaatccgagttggaattcgacgtggtctattcatccgtattgagcagatctcgtcaaacggccgaattgatactctccaagttgaactgcgcctatgtgcccattaaggaggattggcggctgtgcgaaaggcactacggaaatctgactggttgccggaaacgagtggtagccgatcgctatggggaggagcaggttcaggcctggcgacgtggatacgactgcgtaccgccgcccatcgatgagaagaaccgctacttctacaccatttgcagcaatcccatattcgatgatgttcctcgcggtgagttccccctcgcggaatcccttcacatgtgcgtcgatcgagtgaaacccgtgtggaaggaggtcaggcgggaagtgttccaaggcacccgggtactaatgtgcgtccacggaactgtggcccgtgctctcgtccagcacattgagggaatctccaacgaggccatcgaaaaggttaacattccaaattgcgtgccacgcgtctatgagttcgatttgaaaacgggaggcttggttggagctgccatcaatctgggggatcaggagtatattaggcggaagacagcccaggtggcagccattggtgactga

SEQ ID NO: 6263 - protein, 267 aa, Drosophila melanogaster
MVFFKFLKSKLSQFMTKTNRLVILRHGESDFNIENKFCGWHDAPLSEFGVQEALTVAIPALVQSELEFDVVYSSVLSRSRQTAELILSKLNCAYVPIKEDWRLCERHYGNLTGCRKRVVADRYGEEQVQAWRRGYDCVPPPIDEKNRYFYTICSNPIFDDVPRGEFPLAESLHMCVDRVKPVWKEVRREVFQGTRVLMCVHGTVARALVQHIEGISNEAIEKVNIPNCVPRVYEFDLKTGGLVGAAINLGDQEYIRRKTAQVAAIGD

SEQ ID NO: 6264 - DNA, 879 bp, Drosophila melanogaster
  CDS (1)..(879)
atgttggctctggccaggaattcgtggtgtggccaattgctgtgtcgcgtggcgaacatcgaagcccgctgcccgttctcgaagtcatcatccggcggaaagcaggccgagaagaagggcaagtacaggattgtgatggttcgtcatggagagtccgaatggaatcagaagaacctattctgcggatggttcgatgccaagctatcggagaaggggcagcaggaggcctgtgccgctggcaaagcgctcaaagatgccaaaattgagttcgatgtggcccacacctcggtgctgaccagagcccaggagacactcagggccgccctaaagtccagcgagcacaagaagattccggtgtgcaccacgtggcgcctcaacgagcgccactacggcggactgacgggactgaataaggccgagaccgccaagaagttcggcgaggagaaggttaagatctggcgccgcagctttgacaccccaccgccgccaatggagaaggatcacgagtactacgcctgcattgttgaggatccgcgctacaaggaccaactgaagccggaggagttccccaaatccgagtccctcaagctcaccatcgagcgcaccttgccctactggaacgaggtcatagtgccccagatcaaggatggaatgcgtgtcctgatcgccgcccacggcaacagcctgcggggcgtggtcaagcacttggaatgcatctctgacaaggacattatgagcctcaacctgcccactggcattcctttcgtctacgaactagacgagagcctcaagcctttggccacgttgaagttcctcggcgatccggagacggtgaagaaggcaatggagtcggtggccaaccagggcaaagccaagtga

SEQ ID NO: 6265 - protein, 292 aa, Drosophila melanogaster
MLALARNSWCGQLLCRVANIEARCPFSKSSSGGKQAEKKGKYRIVMVRHGESEWNQKNLFCGWFDAKLSEKGQQEACAAGKALKDAKIEFDVAHTSVLTRAQETLRAALKSSEHKKIPVCTTWRLNERHYGGLTGLNKAETAKKFGEEKVKIWRRSFDTPPPPMEKDHEYYACIVEDPRYKDQLKPEEFPKSESLKLTIERTLPYWNEVIVPQIKDGMRVLIAAHGNSLRGVVKHLECISDKDIMSLNLPTGIPFVYELDESLKPLATLKFLGDPETVKKAMESVANQGKAK

SEQ ID NO: 6266 - DNA, 837 bp, Yersinia pestis KIM
  CDS (1)..(837): transl_table=11
gtgattcggctgattgagcgcagccaacgcacatgcagcttgaagtatgacgggcatataccaaacttaattggagtcaacgttatggcagtaactaagctagttttggtacgacacggcgaaagtcaatggaacaacgaaaaccgcttcaccggttggtatgatgttgatctgtctgaaaaaggccgttctgaagcaaaggcagcgggtaagctgttaaaagatgaaggcttcacttttgatttcgcctacacctcagtattaaaacgcgctatccacaccttgtggaacattttggatgaattagatcaggcatggctgccaacagaaaaaacctggaagcttaacgagcgtcactacggcgcactgcaaggcctgaataaatctgaaacggctgaaaaatacggcgatgagcaggttaagcaatggcgtcgtggctttgccatcacccctccagcactggagaaaagcgatgagcgtttcccaggccatgacccacgttatgcaaaattgactgatgctgagctgccaaccacagaaagcttggcgctgactattgaacgcgtgattccctactggaatgacgttatcaaaccacgtattgccagcggtgaacgcgtaattattgctgctcacggtaactctttacgtgcattggtaaaatatctggatgatctgggcgaagacgaaattcttgagctgaacatcccaactggcgtgccattagtgtatgagtttgatgagaacttcaagcctatcaaacactactatctgggtaacgctgatgaaatcgccgctaaagctgcagcggttgctaaccagggtaaagcgaagtaa

SEQ ID NO: 6267 - protein, 278 aa, Yersinia pestis KIM
MIRLIERSQRTCSLKYDGHIPNLIGVNVMAVTKLVLVRHGESQWNNENRFTGWYDVDLSEKGRSEAKAAGKLLKDEGFTFDFAYTSVLKRAIHTLWNILDELDQAWLPTEKTWKLNERHYGALQGLNKSETAEKYGDEQVKQWRRGFAITPPALEKSDERFPGHDPRYAKLTDAELPTTESLALTIERVIPYWNDVIKPRIASGERVIIAAHGNSLRALVKYLDDLGEDEILELNIPTGVPLVYEFDENFKPIKHYYLGNADEIAAKAAAVANQGKAK

SEQ ID NO: 6268 - DNA, 771 bp, Bifidobacterium longum NCC2705
  CDS (1)..(771): transl_table=11
ttgggcgcacgcggctgtagactgaaccgtatgacttataaactagtactgctccgtcatggacagagcgcatggaataaaactaaccagttcaccggctgggtcgacgtaccgctgaccgagcagggtgaagccgaagccaagcgtggcggcgagctgctcaaggagaagaacgtccttccggacatcgtgttcacctccctgctgcgtcgcgccatcaacaccgccaacatcgctctggatgccgcagatcgtctgtggattccggttcagcgtgactggcgtctcaacgagcgtcactacggcgctctgcagggcaagaacaagaccgagatccgcgaagagtacggcgacgagaagttcatgctgtggcgccgttcttacgccaccccgccgcccgagatcgacccgaacgaccagtacgcccagaacaacgacccgcgctacgccggcgatccggttccggaagccgagtgcctggccaacgttgttgagcgtgtgaagccgtacttcgagtccgctatcgagccggagctcaaggccggcaagaccgtgctgattgctgcccacggcaactccctccgcgccatcgtcaagatgctggacaacctgtctgaggaagagatcgccaaggtcaacatcccgaccgccatcccgctgctctacgagctggacgagaacttcaagccgatcaagccgcgtggcgagtacctggacccggaggctgctgctgccggtgccgccgctgtcgccgctcagggccagaagtga

SEQ ID NO: 6269 - protein, 256 aa, Bifidobacterium longum NCC2705
MGARGCRLNRMTYKLVLLRHGQSAWNKTNQFTGWVDVPLTEQGEAEAKRGGELLKEKNVLPDIVFTSLLRRAINTANIALDAADRLWIPVQRDWRLNERHYGALQGKNKTEIREEYGDEKFMLWRRSYATPPPEIDPNDQYAQNNDPRYAGDPVPEAECLANVVERVKPYFESAIEPELKAGKTVLIAAHGNSLRAIVKMLDNLSEEEIAKVNIPTAIPLLYELDENFKPIKPRGEYLDPEAAAAGAAAVAAQGQK

SEQ ID NO: 6270 - DNA, 753 bp, Plasmodium falciparum 3D7
  CDS (1)..(753)
atgactacttatactttagttcttttaagacatggtgaaagtacatggaacaaggaaaacaagttcacaggatggaccgatgttcctttaagtgaaaagggagaagaagaagcaatagctgctggaaaataccttaaggaaaagaatttcaaattcgacgttgtttatacatcagttttgaagagagcaatttgcacagcctggaatgtattaaaaacagctgaccttttacatgttccagttgttaaaacttggagattaaatgaaaggcactatggttcccttcaaggtttaaacaaatcagaaacagccaagaagtatggagaggaacaagtaaaaatatggagaagatcatatgatatccctccaccaaaattagataaggaagataacagatggccaggacacaatgttgtatataaaaatgtaccaaaggatgcattaccatttactgaatgtttaaaagatactgttgaacgagtcttaccattctggtttgatcacatcgcacctgatattttagcaaataaaaaagttatggtagctgctcatggaaatagtttaagaggtttagtcaaacatttagataacttaagtgaagctgatgtattagaacttaacattccaacaggtgtacctttagtttatgaattagatgaaaacttaaagccaataaaacactattatttattagatagtgaagaattaaaaaagaaaatggatgaagtagccaaccaaggaaaagcaaaataa

SEQ ID NO: 6271 - protein, 250 aa, Plasmodium falciparum 3D7
MTTYTLVLLRHGESTWNKENKFTGWTDVPLSEKGEEEAIAAGKYLKEKNFKFDVVYTSVLKRAICTAWNVLKTADLLHVPVVKTWRLNERHYGSLQGLNKSETAKKYGEEQVKIWRRSYDIPPPKLDKEDNRWPGHNVVYKNVPKDALPFTECLKDTVERVLPFWFDHIAPDILANKKVMVAAHGNSLRGLVKHLDNLSEADVLELNIPTGVPLVYELDENLKPIKHYYLLDSEELKKKMDEVANQGKAK

SEQ ID NO: 6272 - DNA, 762 bp, Drosophila melanogaster
  CDS (1)..(762)
atgacgaaaacaaatcgcttggtgattttgaggcatggcgaaagtgatttcaacattgagaacaaattctgcggttggcatgatgcgccattgagtgaattcggcgtccaggaggccctgactgtggcgattcccgcgctcgtccaatccgagttggaattcgacgtggtctattcatccgtattgagcagatctcgtcaaacggccgaattgatactctccaagttgaactgcgcctatgtgcccattaaggaggattggcggctgtgcgaaaggcactacggaaatctgactggttgccggaaacgagtggtagccgatcgctatggggaggagcaggttcaggcctggcgacgtggatacgactgcgtaccgccgcccatcgatgagaagaaccgctacttctacaccatttgcagcaatcccatattcgatgatgttcctcgcggtgagttccccctcgcggaatcccttcacatgtgcgtcgatcgagtgaaacccgtgtggaaggaggtcaggcgggaagtgttccaaggcacccgggtactaatgtgcgtccacggaactgtggcccgtgctctcgtccagcacattgagggaatctccaacgaggccatcgaaaaggttaacattccaaattgcgtgccacgcgtctatgagttcgatttgaaaacgggaggcttggttggagctgccatcaatctgggggatcaggagtatattaggcggaagacagcccaggtggcagccattggtgactga

SEQ ID NO: 6273 - protein, 253 aa, Drosophila melanogaster
MTKTNRLVILRHGESDFNIENKFCGWHDAPLSEFGVQEALTVAIPALVQSELEFDVVYSSVLSRSRQTAELILSKLNCAYVPIKEDWRLCERHYGNLTGCRKRVVADRYGEEQVQAWRRGYDCVPPPIDEKNRYFYTICSNPIFDDVPRGEFPLAESLHMCVDRVKPVWKEVRREVFQGTRVLMCVHGTVARALVQHIEGISNEAIEKVNIPNCVPRVYEFDLKTGGLVGAAINLGDQEYIRRKTAQVAAIGD

SEQ ID NO: 6274 - DNA, 768 bp, Escherichia coli CFT073
  CDS (1)..(768): transl_table=11
ttgaggagtaagtatatggctgtaactaagctggttctggttcgtcatggcgaaagtcagtggaacaaagaaaaccgtttcaccggttggtacgacgtggatctgtctgagaaaggcgtaagcgaagcaaaagcagcaggtaagctgctgaaagaggaaggttacagctttgactttgcttacacctctgtgctgaaacgcgctattcataccctgtggaatgtgttggacgaactggatcaggcatggctgcccgttgagaaatcctggaaactgaacgaacgtcactacggtgcgttgcagggtctgaacaaagcggaaaccgctgaaaagtatggcgacgagcaggtgaaacagtggcgtcgtggttttgcggtgactccgccggaactgactaaagatgatgagcgttatccggggcacgatccgcgttacgcgaaactgagcgagaaagagctgccgctgacggaaagcctggcgctgaccattgaccgcgtgatcccttactggaatgaaaccattctgccacgtatgaagagcggtgagcgcgtcatcatcgccgcacacggtaactcgttacgtgcgctggtgaaatatctcgataacatgagcgaagaagagattcttgagctgaatatcccgaccggcgtgccgctggtttatgagtttgacgagaacttcaaaccgctgaaacgctattatctgggtaatgctgacgagatcgcggcgaaagcagcggcggttgctaaccagggtaaagcgaagtaa

SEQ ID NO: 6275 - protein, 255 aa, Escherichia coli CFT073
MRSKYMAVTKLVLVRHGESQWNKENRFTGWYDVDLSEKGVSEAKAAGKLLKEEGYSFDFAYTSVLKRAIHTLWNVLDELDQAWLPVEKSWKLNERHYGALQGLNKAETAEKYGDEQVKQWRRGFAVTPPELTKDDERYPGHDPRYAKLSEKELPLTESLALTIDRVIPYWNETILPRMKSGERVIIAAHGNSLRALVKYLDNMSEEEILELNIPTGVPLVYEFDENFKPLKRYYLGNADEIAAKAAAVANQGKAK

SEQ ID NO: 6276 - DNA, 789 bp, Drosophila melanogaster
  CDS (1)..(789)
atgcgcgaaattcaggcctcccaatttatgacgaaaacaaatcgcttggtgattttgaggcatggcgaaagtgatttcaacattgagaacaaattctgcggttggcatgatgcgccattgagtgaattcggcgtccaggaggccctgactgtggcgattcccgcgctcgtccaatccgagttggaattcgacgtggtctattcatccgtattgagcagatctcgtcaaacggccgaattgatactctccaagttgaactgcgcctatgtgcccattaaggaggattggcggctgtgcgaaaggcactacggaaatctgactggttgccggaaacgagtggtagccgatcgctatggggaggagcaggttcaggcctggcgacgtggatacgactgcgtaccgccgcccatcgatgagaagaaccgctacttctacaccatttgcagcaatcccatattcgatgatgttcctcgcggtgagttccccctcgcggaatcccttcacatgtgcgtcgatcgagtgaaacccgtgtggaaggaggtcaggcgggaagtgttccaaggcacccgggtactaatgtgcgtccacggaactgtggcccgtgctctcgtccagcacattgagggaatctccaacgaggccatcgaaaaggttaacattccaaattgcgtgccacgcgtctatgagttcgatttgaaaacgggaggcttggttggagctgccatcaatctgggggatcaggagtatattaggcggaagacagcccaggtggcagccattggtgactga

SEQ ID NO: 6277 - protein, 262 aa, Drosophila melanogaster
MREIQASQFMTKTNRLVILRHGESDFNIENKFCGWHDAPLSEFGVQEALTVAIPALVQSELEFDVVYSSVLSRSRQTAELILSKLNCAYVPIKEDWRLCERHYGNLTGCRKRVVADRYGEEQVQAWRRGYDCVPPPIDEKNRYFYTICSNPIFDDVPRGEFPLAESLHMCVDRVKPVWKEVRREVFQGTRVLMCVHGTVARALVQHIEGISNEAIEKVNIPNCVPRVYEFDLKTGGLVGAAINLGDQEYIRRKTAQVAAIGD

SEQ ID NO: 6278 - DNA, 786 bp, Corynebacterium diphtheriae NCTC 13129
  CDS (1)..(786): transl_table=11
ttgctcgcgttgctgcgattcgtggcaaacttgacaagtatgactactggaaaactgattcttcttcgtcacggacaaagcgaatggaacgcttccaaccaattcaccggctgggtggacgtcaacctcaccgaaaagggcgaggcagaggctaagcgcggcggcgagctgctcaaggctcagggggtcctgccaagcgtggtgtacacctctttgctgcgccgtgctatccgcaccgccaacattgctctgaacgctgctgatcgccattggatcccagttgttcgcgattggcgcctcaacgagcgccactacggtgcgctgcagggcctgaacaaggctgagactaaggaaaagtacggcgacgagcagttcatggcatggcgtcgttcttatggcaccccaccaccagagcttgaggattccagcgagttctcccaggcaaacgatcctcgttacgccaaccttgacgtggttcctcgcaccgagtgcttgaaggacgttgttgagcgtttcgttccttacttcaaggaagagatcctgccacgtgtgaagaacggtgagactgttttgatcgctgcacacggtaactccctgcgtgcattggtcaagcacctagacaacatctctgatgcagacatcgctgagctcaacatccctaccggtattccactggtttatgagctcgacgaggctggcacggtgctcaacccaggtggcacctaccttgacccagaagctgctgctgccggtgctgccgcagttgctgctcagggcgctaagtag

SEQ ID NO: 6279 - protein, 261 aa, Corynebacterium diphtheriae NCTC 13129
MLALLRFVANLTSMTTGKLILLRHGQSEWNASNQFTGWVDVNLTEKGEAEAKRGGELLKAQGVLPSVVYTSLLRRAIRTANIALNAADRHWIPVVRDWRLNERHYGALQGLNKAETKEKYGDEQFMAWRRSYGTPPPELEDSSEFSQANDPRYANLDVVPRTECLKDVVERFVPYFKEEILPRVKNGETVLIAAHGNSLRALVKHLDNISDADIAELNIPTGIPLVYELDEAGTVLNPGGTYLDPEAAAAGAAAVAAQGAK

SEQ ID NO: 6280 - DNA, 765 bp, Danio rerio
  CDS (1)..(765)
atggctgcatacaagctggttcttattcgccatggcgagagctgctggaaccaagagaatcgattctgtggctggtttgacgcggacctgagcgagacaggggctcaggaggcgaagagaggaggtcaagctttaaaggatgcagggtttgagtttgacatttgttacacctctgtgctgaagagggctatccggacactgtggattgttctggacagtattgatcagatgtggctgcctgtgcacaggacctggcggctgaatgaacgccattacggtggtctcactgggttaaacaaggccgaaactgcagccaagcatggtgaagcccaggttaaaatttggaggcgctcctatgacattccaccacccagtatggatgaagatcatgacttttacagcatcatcagcaaggaccgacgttatggtgatctgactgaggaccagctgccttcttgtgagagtctgaaggacactattgcacgtgctctgcctttctggaatgatgaaattgtgcctcaaatcaaggagggaaagcgggtgttgattgccgctcatgggaacagtttgagaggcattgtgaagcacttagaaggaatgtctgaggaggccatcatggagctgaatctgcccacagggatccctattctttacgagctggacaagaacctgaagcccatcaagcccatgcagttcctcggggatgaggaaaccgttcgcaaagccatggaggctgtggcagctcagggcaaagccaagaaatag

SEQ ID NO: 6281 - protein, 254 aa, Danio rerio
MAAYKLVLIRHGESCWNQENRFCGWFDADLSETGAQEAKRGGQALKDAGFEFDICYTSVLKRAIRTLWIVLDSIDQMWLPVHRTWRLNERHYGGLTGLNKAETAAKHGEAQVKIWRRSYDIPPPSMDEDHDFYSIISKDRRYGDLTEDQLPSCESLKDTIARALPFWNDEIVPQIKEGKRVLIAAHGNSLRGIVKHLEGMSEEAIMELNLPTGIPILYELDKNLKPIKPMQFLGDEETVRKAMEAVAAQGKAKK

SEQ ID NO: 6282 - DNA, 777 bp, Rattus norvegicus
  CDS (1)..(777)
atgtcgaagcacagacttattatactaagacacggagagggccaatggaataaggagaaccgattctgtagttgggtggaccagaaacttaacagtgacggactggaggaggctcggaactgtgggaggcagctcaaagctctcaacttcgagtttgatctcgtcttcacgtccatccttaacaggtccattcacacagcctggctgatcctggaagagctggggcaggagtgggttcctgtggagagctcttggcgtctgaatgagcgtcactatggagccttgattggtctcaacagggagaaaatggctttgaatcatggtgaagagcaggtaaggctctggaggagaagctacaacgtgaccccacctcccattgaggagtctcatcccttcttccatgagatctacaatgaccggaggtacaaagtgtgcgacgtgcccttggatcaactgccacgttcagaaagcttgaaggatgttctggaaagacttcttccctactggaaggaaaggatttctccggaaatcttgaagggcaaaaccgttctgatatctgctcatgggaatagcagtagagccctcctgaaacatctagaaggtatctcagacgaggatatcatcaacatcactctgcccactggagttccgattctgctggagttggatgagaacctgcgtgccattaggcctcaccagttcttgggcaaccaggaggccatccaggcagccattaagaaagtggatgatcaagggaaagtgagacaaaacaaataa

SEQ ID NO: 6283 - protein, 258 aa, Rattus norvegicus
MSKHRLIILRHGEGQWNKENRFCSWVDQKLNSDGLEEARNCGRQLKALNFEFDLVFTSILNRSIHTAWLILEELGQEWVPVESSWRLNERHYGALIGLNREKMALNHGEEQVRLWRRSYNVTPPPIEESHPFFHEIYNDRRYKVCDVPLDQLPRSESLKDVLERLLPYWKERISPEILKGKTVLISAHGNSSRALLKHLEGISDEDIINITLPTGVPILLELDENLRAIRPHQFLGNQEAIQAAIKKVDDQGKVRQNK

SEQ ID NO: 6284 - DNA, 765 bp, Danio rerio
  CDS (1)..(765)
atggccgcctataagctggtgctgatccgccacggagagagcgtctggaaccaggagaacaggttctgcggatggttcgacgccgatctcagcgacaccggagaggcggaggccaagagaggtggacaggccctgaaagatgcgggttacgagttcgacatctgctacacatcagtgctgaagagagcgatcagggctctgtggctggtgctggacggcattgatcagatgtggctgccggttcaccgcacctggcgtctgaacgagcggcactacggcggcctgacgggtcttaataaagctgaaaccgcagccaaacatggagaggcacaggtcaagatatggagacgctcctacgacattcctcctccacccatggaccctgagcacaacttctacaccgccatcagcaaggaccggcgttacggggacctgacagaggatcagctgccctcctgcgagagtctaaaggacaccatcgctcgagcactgcccttctggaatgaggagatcgtcccgcagatcaaggagggaaagagggtcctcatcgcagcccacgggaacagcctgagaggaatcgtcaaacacctggagggaatgtcggaggaggcgattatggagctcaatctgcccacggggatccccatcctgtacgagctggacaagaacctgaagccagtgaagcctatgcagttcctgggggatgaagagaccgtccgcaaggccatggaggctgtcgctgcgcaggggaaagcaaagaagtag

SEQ ID NO: 6285 - protein, 254 aa, Danio rerio
MAAYKLVLIRHGESVWNQENRFCGWFDADLSDTGEAEAKRGGQALKDAGYEFDICYTSVLKRAIRALWLVLDGIDQMWLPVHRTWRLNERHYGGLTGLNKAETAAKHGEAQVKIWRRSYDIPPPPMDPEHNFYTAISKDRRYGDLTEDQLPSCESLKDTIARALPFWNEEIVPQIKEGKRVLIAAHGNSLRGIVKHLEGMSEEAIMELNLPTGIPILYELDKNLKPVKPMQFLGDEETVRKAMEAVAAQGKAKK

SEQ ID NO: 6286 - DNA, 744 bp, Eremothecium gossypii
  CDS (1)..(744)
atgcctaagttagtcctagttagacacggtcaatccgaatggaacgaggagaacctattcaccggctgggtggacgttaagttgtccgctgtcggcgagcaagaggctgccagagctggtgagctattgaaggagcacaatgtcaacccagacattcttttcacctcgaagttgaccagagccatccagaccgccaacattgcgttgaccaaggccgacagaatatggatcccagtcgagcgttcgtggagactaaacgagagacactacggtgacctacagggcaaggacaaggctgccaccttggccgcattcggcgaggagaagttcaacacgtacagaagatccttcgacgttcctcctccacctattgcggacgactctgagttctcgcagagcaacgatgagagatacagagacgtggacccaaacgtcttgcctaagactgagtctttggccttggtcatcgacagactgttgccttactggcaggacaccatctccaaggagttgttgagcggcaagactgttatgatcactgcccacggtaactcgttgagaggtttggtcaagcacctagagggcatctctgacgccgacatcgccaagctaaacatccctaccggtatcccattggtgttcgagctggatgagaacttgaagccaaccaagccatcctactacttggacccagaggccgctgccgccggtgctgctgccgttgccaaccaaggtaagaaatag

SEQ ID NO: 6287 - protein, 247 aa, Eremothecium gossypii
MPKLVLVRHGQSEWNEENLFTGWVDVKLSAVGEQEAARAGELLKEHNVNPDILFTSKLTRAIQTANIALTKADRIWIPVERSWRLNERHYGDLQGKDKAATLAAFGEEKFNTYRRSFDVPPPPIADDSEFSQSNDERYRDVDPNVLPKTESLALVIDRLLPYWQDTISKELLSGKTVMITAHGNSLRGLVKHLEGISDADIAKLNIPTGIPLVFELDENLKPTKPSYYLDPEAAAAGAAAVANQGKK

SEQ ID NO: 6288 - DNA, 903 bp, Eremothecium gossypii
  CDS (1)..(903)
atgacggagaataggaagacggtcaagctgtttcttcttcggcatggcgagtcagagctgaaccatgcgaaaatattctgtgggtggatcgatgcccaccttacagataaaggaaaggaccaggcgagaagttcagcatctcttatcgcctcgttttgcagggagcatggaattgaacctccactcgtaggttatacatcgaggctacttcggactattgaaaccatgcaagtgatcatgaaggagcttcgcagagcggccgttttccaaaccgttgtagataccgcggacgcattagcagtagttgacaaggtaactgcagccggccagacccctgttctacaagtttggacgctaaatgaacgccactatggttcctggcagggtcaaagaaagtcaagtgttttagaacagtttgggaagagtgattacatgctcatcagaagagactacaatgggcggccacctgccgttgatttaggtagggagatgatccaggaggataacgaacaagggccactgacaggctacgacttcaaggagcccaaccgccggctcaagtatgggccagagcttgaaaaagcaattgaacttcctcgtaacgaatctctagcggatgttatcaaaagattggcacccttcttaaatgaagttgtgctgaaattacttcatgaattaggagaaagtgccattatagtagcacatggaagtacagtaaggtctgttcttaagattttagcaaacatctcggaagaggacataaaggacattgatattcctaccggaaatcctctggtcatcgaactgaacgcaagtgacatgtctttcgttcggcacttttatttagaccccgaatctgctaggaaggaggcggagaacgtgcgaaacgaaggttgtaactga

SEQ ID NO: 6289 - protein, 300 aa, Eremothecium gossypii
MTENRKTVKLFLLRHGESELNHAKIFCGWIDAHLTDKGKDQARSSASLIASFCREHGIEPPLVGYTSRLLRTIETMQVIMKELRRAAVFQTVVDTADALAVVDKVTAAGQTPVLQVWTLNERHYGSWQGQRKSSVLEQFGKSDYMLIRRDYNGRPPAVDLGREMIQEDNEQGPLTGYDFKEPNRRLKYGPELEKAIELPRNESLADVIKRLAPFLNEVVLKLLHELGESAIIVAHGSTVRSVLKILANISEEDIKDIDIPTGNPLVIELNASDMSFVRHFYLDPESARKEAENVRNEGCN

SEQ ID NO: 6290 - DNA, 960 bp, Candida glabrata CBS138
  CDS (1)..(960)
atgtcgacgctaaagttgtttatattgaggcatgggcagagtgatttgaaccatgagaatatcttttgtgggtggattgatgctaaattgaccgataaagggcgttcccaggccaagaatgctggtcaattgattgctcagcattgtaagagcaatggtattacgttgcctcagatcggttttacttccagactgctcagaaccgagcaaactatggatgttatcctcaatgagctgcaattggggaagaaagacgaggtaagtggtcaattcaataatcccgtgtttgtggtatttgactatatctatacattggctgagataagaagctatctgttgagtgagaaggaagagaaccctataagtaatgaaatccctgtattgaggacatggaggctcaatgaaagacactacggtgcttggcaggggcaaagaaagccaaaagtcttgaaagaatatggtgaagaacagtacatgtacattcgaagagactataacggcaggccaccagaagttgatctcgagaaagagatgattcagaaacatgacttaggtgctgccactggttatgagttcaaagaacccaacaggtcattgaaatacgagttagaagaactaaaccagaatattaagctaccgtactcagagtccctttctgatgtggtggctagattagaacctttccttgacgagattatcttgaaagtggctaaagaatttgatcttgactcctgtctaattgttggtcacggtagctctgttagatccctgttgaaaattctcgaaggtgtttctgatgaagatatcaaaggagttgacattccaaatggtattccattggttatagaattggacaagacgaacaacttcaagtttttaagaaaatactacctggaccctgagcttgctaagatcaatgctgaaaaagtgcgtaaggaaggttttgaagaaaacccttag

SEQ ID NO: 6291 - protein, 319 aa, Candida glabrata CBS138
MSTLKLFILRHGQSDLNHENIFCGWIDAKLTDKGRSQAKNAGQLIAQHCKSNGITLPQIGFTSRLLRTEQTMDVILNELQLGKKDEVSGQFNNPVFVVFDYIYTLAEIRSYLLSEKEENPISNEIPVLRTWRLNERHYGAWQGQRKPKVLKEYGEEQYMYIRRDYNGRPPEVDLEKEMIQKHDLGAATGYEFKEPNRSLKYELEELNQNIKLPYSESLSDVVARLEPFLDEIILKVAKEFDLDSCLIVGHGSSVRSLLKILEGVSDEDIKGVDIPNGIPLVIELDKTNNFKFLRKYYLDPELAKINAEKVRKEGFEENP

SEQ ID NO: 6292 - DNA, 861 bp, Kluyveromyces lactis NRRL Y-1140
  CDS (1)..(861)
atgagattgtatgttttaaggcacggccaaagtgaagtaaaccaaagaaacatatttgggggatgggtagatgttcatctgactgaaaagggtctagatcaggccaggaatagcgccattcttattaaagcatactgtcaatcgcaaggtttggagctacccaagcttggttatacttccagattgatcagaacagaagagaccatgaatgagattctcaaagagtttggcaaacagcctgaatttcgtatcgtcagcggtgagctaccaccgcaacagacatcagataatggtaaattcccagtttatcagagctggagattgaatgaaagacactacggttcatggcagggtcaaagtaaacataaaatgttggaagagtatggtgaagaacagtatatgtatatcagaagagattacctcggaaaacctccaaaagcagatttaaacagggagatggtacaagatttcgaccaaggtgatacaggatatgaatttaaagaaccaaacaggcatgttaaatatttggaggaagagattactcatgatgaattgcccaatggtgagtctttgtgcgatgtcgttcaaagattgaaaccattgcttgaaaatatgattcttccgaacttgaaggaacgtggtgacagccttatagtcggtcatggaagcacagtccgttcactcttaaagattttagaaggcattagcgatactgacattaaggaagtcaatattcctaatgccattccttcagtcattgaactagatgataatttcagatttattagaaaattctacttagacccagaaagtgccaaagtcaatgcagaattagttcgccaggaaggattcaaggaataa

SEQ ID NO: 6293 - protein, 286 aa, Kluyveromyces lactis NRRL Y-1140
MRLYVLRHGQSEVNQRNIFGGWVDVHLTEKGLDQARNSAILIKAYCQSQGLELPKLGYTSRLIRTEETMNEILKEFGKQPEFRIVSGELPPQQTSDNGKFPVYQSWRLNERHYGSWQGQSKHKMLEEYGEEQYMYIRRDYLGKPPKADLNREMVQDFDQGDTGYEFKEPNRHVKYLEEEITHDELPNGESLCDVVQRLKPLLENMILPNLKERGDSLIVGHGSTVRSLLKILEGISDTDIKEVNIPNAIPSVIELDDNFRFIRKFYLDPESAKVNAELVRQEGFKE

SEQ ID NO: 6294 - DNA, 762 bp, Debaryomyces hansenii CBS767
  CDS (1)..(762)
atggctgtccataaattaataatattacgtcacggagaatcggaatggaatcatgaaaacaggttctgtgggtggatcgatataccattaagtgaaaagggccgggatgaggccaagtttgctggccacttgattcaaaagtacaatcttaaaccaacaattacttacacatcgaaattgacgagatcgatacagacaggcgacattattctcgaagaattgggccggttgtggtgcgatgttgtgaagacatggaggttgaatgaaagacactacggggcattccaagggagagataagaacgaggtgtaccgtgaattgggcgcggaaaagtaccagtatatcagaagaaactacaacgggacaccaccaccaatggaaactcaatataaggatgattgtatcgatgagaggtacgaagtggatgatgttgatattgcagatcttccacgaggcgaatcgttgaagttagtgatggagagagtgattccgtatttacggaaggaaattgttgaaggaagcttaattggcgacaataagacggtgcttgtggtaacacacggaagtatagtgaggagcgtgattaagtatttcaagggtgtgagtgatgctgatatctcgaagatcaacgttcctaccggggttccgatggtgtttgaattggatgacgattgtaacatggtgaaggactactactatcttgatccagagttggcaaagaaaggaattgagaaggtaagcaacgagggcaccaaaaaatag

SEQ ID NO: 6295 - protein, 253 aa, Debaryomyces hansenii CBS767
MAVHKLIILRHGESEWNHENRFCGWIDIPLSEKGRDEAKFAGHLIQKYNLKPTITYTSKLTRSIQTGDIILEELGRLWCDVVKTWRLNERHYGAFQGRDKNEVYRELGAEKYQYIRRNYNGTPPPMETQYKDDCIDERYEVDDVDIADLPRGESLKLVMERVIPYLRKEIVEGSLIGDNKTVLVVTHGSIVRSVIKYFKGVSDADISKINVPTGVPMVFELDDDCNMVKDYYYLDPELAKKGIEKVSNEGTKK

SEQ ID NO: 6296 - DNA, 621 bp, Bartonella quintana str. Toulouse
  CDS (1)..(621): transl_table=11
atgggacgcacacttgtattaatccgtcatggacaaagtgaatggaatatcaaaaatctttttaccggttggaaagaccccggtttgacagaaaaaggccatgcagaagcaataacagcaggaaaaaatctcaaagcagctggtttaaaatttgatattgcttatacatctgccttacagcgtgcacaaaaaacggctcagcacattttagaacaaatgggacaatcagatttgccattgataaaaaactcggcattgaatgaacgtgattatggtgatctctctgggctaaataaagatgaagtacgtcaacaatggggagaacaacaagtgcaaatatggcgtcgctcctatgctgttgcgccccctaatggagaaagcctacgcgatactggtgcacgtgtttggccctactatctttaccatattcaacctcatattttgcgttctcaaactgttttgattgcagcacatggtaattctcttcgtgctcttattatggcacttgaaggtctaaatagtgaagaaattatatctcaagaattaacaactggcattcctcttatttatacatttaattccgactcaacaatttcatcaaagaccattatcacaccctaa

SEQ ID NO: 6297 - protein, 206 aa, Bartonella quintana str. Toulouse
MGRTLVLIRHGQSEWNIKNLFTGWKDPGLTEKGHAEAITAGKNLKAAGLKFDIAYTSALQRAQKTAQHILEQMGQSDLPLIKNSALNERDYGDLSGLNKDEVRQQWGEQQVQIWRRSYAVAPPNGESLRDTGARVWPYYLYHIQPHILRSQTVLIAAHGNSLRALIMALEGLNSEEIISQELTTGIPLIYTFNSDSTISSKTIITP

SEQ ID NO: 6298 - DNA, 738 bp, Bacillus thuringiensis serovar konkukian str. 97-27
  CDS (1)..(738): transl_table=11
atgataaaacttgtacttattcgtcacggacagagtttatggaatcttgaaaatcgttttactggatggacagatgtagatttatcagagaatggattaagtgaagcgagagaagcaggagcgatattaaagaaaaatggatatacttttgatgtagcttatacatctgtattaaaacgagcaattcggacgttatggattgtacttcatgaaatgaatcttgcctgggtaccagtacataaatcttggaagctaaatgaaagacattatggtgcattgcaaggtttgaataaagatgaaaccgcgcaaaaatatggtgaggagcaagttcatatttggagaagaagtattgatgtaagaccacctgctcttactgaggatgatcctaggtatgaaatgaatgatccaagatataaaacactgaaaaaaggtgagtttccattgacagaatgtttagtggatacagagaaaagagtacttgcttattggcactcagaaattgcaccgaaattaaaggatggtaacaaagtaatcatttcatcgcatggtaacacaattcgctcgctagtaaaatatttagacaatctttcaagtgatggtgttgtttcattaaatattccaacgagtattccgctcgtgtatgaattagacgaaaatttacgtccgattcgccattattacttaagtatggatggagaagtacctgaaggagaaattccgaaacatattactttttaa

SEQ ID NO: 6299 - protein, 245 aa, Bacillus thuringiensis serovar konkukian str. 97-27
MIKLVLIRHGQSLWNLENRFTGWTDVDLSENGLSEAREAGAILKKNGYTFDVAYTSVLKRAIRTLWIVLHEMNLAWVPVHKSWKLNERHYGALQGLNKDETAQKYGEEQVHIWRRSIDVRPPALTEDDPRYEMNDPRYKTLKKGEFPLTECLVDTEKRVLAYWHSEIAPKLKDGNKVIISSHGNTIRSLVKYLDNLSSDGVVSLNIPTSIPLVYELDENLRPIRHYYLSMDGEVPEGEIPKHITF

SEQ ID NO: 6300 - DNA, 687 bp, Staphylococcus aureus subsp. aureus MRSA252
  CDS (1)..(687): transl_table=11
atgccaaaattaattttatgtcgtcatggacaaagcgagtggaatgctaaaaacttatttactggatgggaagatgttaatttatctgaacaaggtattaatgaagcgactagagcaggtgaaaaagtaagagaaaataacattgacatcgatgtagcttttacatcgttattaacacgtgctttagatacaacgcattatattttaactgaatctaaacaacaatggattcctgtatataaaagctggcgtttaaatgagcgtcactatggtggattgcaaggcttaaataaagatgatgctagaaaagaatttggagaggaacaagtacatatttggcgtcgttcttatgatgtgaaaccacctgctgaaaccgaagaacaacgtgaagcttacttagctgatcgtcgatataatcatttagataaacgtatgatgccttattccgaaagtctgaaagatactttagttcgagtgataccattttggacagatcatatttcacaatatttgctagatggtcaaacggtattagtttctgcacacggaaattcaattcgcgcattgattaaatatcttgaagatgtgtcagatgaagatatcattaattatgaaattaaaacaggtgcaccgcttgtttatgaattaacggatgatttagaagttatagataaatactacttataa

SEQ ID NO: 6301 - protein, 228 aa, Staphylococcus aureus subsp. aureus MRSA252
MPKLILCRHGQSEWNAKNLFTGWEDVNLSEQGINEATRAGEKVRENNIDIDVAFTSLLTRALDTTHYILTESKQQWIPVYKSWRLNERHYGGLQGLNKDDARKEFGEEQVHIWRRSYDVKPPAETEEQREAYLADRRYNHLDKRMMPYSESLKDTLVRVIPFWTDHISQYLLDGQTVLVSAHGNSIRALIKYLEDVSDEDIINYEIKTGAPLVYELTDDLEVIDKYYL

SEQ ID NO: 6302 - DNA, 753 bp, Erwinia carotovora subsp. atroseptica SCRI1043
  CDS (1)..(753): transl_table=11
atggctgtaactaagctagtactggtaagacacggtgagagccagtggaacaacgaaaaccgcttcacaggctggtacgatgttgatctgtccgaaaagggccgttcagaagccaaagccgcaggtcagttgctgaaagacgaaggttttgcctttgatttcgcgtatacctccgtgctgaaacgtgccattcacacactgtggagcgtactggacgagctggatcaagcctggttgccagttgagaaatcctggaaactgaatgagcgccactacggtgcattacagggtctgaacaaagcagaaaccgctgagaaatacggtgatgagcaggttaaacaatggcgccgtggtttcgcaatcacacctccagagttgacgcgtgatgacgaacgtttcccgggccacgatccgcgttacgcttctctgagcgacaaagagctgccacagactgaaagcctagcgctgaccatcgaacgtgttgtgccttactggaccgaaaccatcctgccacgtatcaagagcggtgagcgcgtcatcgtcgcagctcacggtaactcactgcgtgcactggtgaaatatctggacaacatgggcgaagacgaaattctggaactgaatatcccaactggcgtgccgttggtatatgagttcgacgagaacttcaagccaatcaaacgttactacctgggcaacgcggacgaaatcgccgcaaaagctgccgcagtagcgaatcagggtaaagcgaagtaa

SEQ ID NO: 6303 - protein, 250 aa, Erwinia carotovora subsp. atroseptica SCRI1043
MAVTKLVLVRHGESQWNNENRFTGWYDVDLSEKGRSEAKAAGQLLKDEGFAFDFAYTSVLKRAIHTLWSVLDELDQAWLPVEKSWKLNERHYGALQGLNKAETAEKYGDEQVKQWRRGFAITPPELTRDDERFPGHDPRYASLSDKELPQTESLALTIERVVPYWTETILPRIKSGERVIVAAHGNSLRALVKYLDNMGEDEILELNIPTGVPLVYEFDENFKPIKRYYLGNADEIAAKAAAVANQGKAK

SEQ ID NO: 6304 - DNA, 750 bp, Propionibacterium acnes KPA171202
  CDS (1)..(750): transl_table=11
atgactgcaaagctcatcctgctccgccatggcgagagcgaatggaactccaagaacctcttcaccggctgggtggacgtcgatctcaacgagaagggcgagggcgaggctcgtcacgccgccgacctgctcaagcaggaaaacctcctgcccgatatcgtccacacctcgctgctacgtcgtgctatccataccgcctacctagcccttgacggctgcgaccgccattggatcccggtgcatcgctcctggcgcctcaacgagcgtcactacggtgcgctgcagggtctcaacaaggctgagaccaaggagaagtacggcaacgaccagttcatggcttggcgtcgctcctacgatgttcgtccaccggaccttgaccgcgacagcgaattcagccagttccatgacccgcggtacgccgacatcccggcgtccgagcgtccggtcgccgagtgtctcaaagacgtcgtggcccgcatggtgccgtacttcacctctgatattgctgccgaccttaaggacggcaagacggtgctcgtggctgctcacggtaactccctgcgcgccctcgtcaagcacctcgacgagatcagtgacgaggacatcgccggcctcaacatcccgaccggtatcccgctgttctacgagcttgacgacaacctcaagcccgtgactagggggggccgctacctcgaccctgaggccgctgccgccggcgccaaggcagtcgctaaccagggaaacaagtaa

SEQ ID NO: 6305 - protein, 249 aa, Propionibacterium acnes KPA171202
MTAKLILLRHGESEWNSKNLFTGWVDVDLNEKGEGEARHAADLLKQENLLPDIVHTSLLRRAIHTAYLALDGCDRHWIPVHRSWRLNERHYGALQGLNKAETKEKYGNDQFMAWRRSYDVRPPDLDRDSEFSQFHDPRYADIPASERPVAECLKDVVARMVPYFTSDIAADLKDGKTVLVAAHGNSLRALVKHLDEISDEDIAGLNIPTGIPLFYELDDNLKPVTRGGRYLDPEAAAAGAKAVANQGNK

SEQ ID NO: 6306 - DNA, 750 bp, Leifsonia xyli subsp. xyli str. CTCB07
  CDS (1)..(750): transl_table=11
atgtccgcttctcacgctttgatccttctgcgccacggcaacagcgagtggaaccggcagaatctgttcaccggctgggtggacgtccggctcagcgagcagggtgtcgctgaagccaagcgggccggcgagctgctggccgagtcgggtcttgtgcccgacatcctgtacacctccctcctgacccgcgctattcagacggcgaaccatgcgctcgatgccgccgaccggctctggattcccgtcgtgcgctcctggcggctcaacgagcgccactacggcgctttgcagggtctcgacaaggccgagacgcttgagaagtatggtcccgagcagttccagctctggcgtcgttccttcgatgtgccgccgcccccgctggccgacgacagcgagtggtcgcaggcggacgacccgcgctacgcggacctcggcgcggacctgccccgcaccgagtgcctcaaagacgtcatcgcccggatgctgcctttctgggagtcggacatcaccacgagcctcagtgcggggaagaccgtgctcgtcaccgcccacggcaactcgctccgcgccctggtgaagcatctcgacggcatctccgacgacgacatcgcggagctcaacatcccgaccggcgtcccgctcgtctacaagctcgacgactcgttcaagcccgttgagcccgccgcctacctcgaccccgaggccgccgccgtcggcgccgctgccgtcgccgcccagggcaagaagtag

SEQ ID NO: 6307 - protein, 249 aa, Leifsonia xyli subsp. xyli str. CTCB07
MSASHALILLRHGNSEWNRQNLFTGWVDVRLSEQGVAEAKRAGELLAESGLVPDILYTSLLTRAIQTANHALDAADRLWIPVVRSWRLNERHYGALQGLDKAETLEKYGPEQFQLWRRSFDVPPPPLADDSEWSQADDPRYADLGADLPRTECLKDVIARMLPFWESDITTSLSAGKTVLVTAHGNSLRALVKHLDGISDDDIAELNIPTGVPLVYKLDDSFKPVEPAAYLDPEAAAVGAAAVAAQGKK

SEQ ID NO: 6308 - DNA, 753 bp, Yersinia pseudotuberculosis IP 32953
  CDS (1)..(753): transl_table=11
atggcagtaactaagctagttttggtacgacacggcgaaagtcaatggaacaacgaaaaccgcttcaccggttggtatgatgttgatctgtctgaaaaaggccgttctgaagcaaaggcagcgggtaagctgttaaaagatgaaggcttcacttttgatttcgcctacacctcagtattaaaacgcgctatccacaccttgtggaacattttggatgaattagatcaggcatggctgccaacagaaaaaacctggaagcttaacgagcgtcactacggcgcactgcaaggcctgaataaatctgaaactgctgaaaaatacggcgatgagcaggttaagcaatggcgtcgtggctttgccatcacccctccagcactggagaaaagcgatgagcgtttcccaggccatgacccacgttatgcaaaattgactgatgctgagctgccaaccacagaaagcttggcgctgactattgaacgcgtgattccctactggaatgacgttatcaaaccacgtattgccagcggtgaacgcgtaattattgctgctcacggtaactctttacgtgcattggtaaaatatctggatgatctgggcgaagacgaaattcttgagctgaacatcccaactggcgtgccattagtgtatgagtttgatgagaacttcaagcctatcaaacactactatctgggtaacgctgatgaaatcgccgctaaagctgcagcggttgctaaccagggtaaagcgaagtaa

SEQ ID NO: 6309 - protein, 250 aa, Yersinia pseudotuberculosis IP 32953
MAVTKLVLVRHGESQWNNENRFTGWYDVDLSEKGRSEAKAAGKLLKDEGFTFDFAYTSVLKRAIHTLWNILDELDQAWLPTEKTWKLNERHYGALQGLNKSETAEKYGDEQVKQWRRGFAITPPALEKSDERFPGHDPRYAKLTDAELPTTESLALTIERVIPYWNDVIKPRIASGERVIIAAHGNSLRALVKYLDDLGEDEILELNIPTGVPLVYEFDENFKPIKHYYLGNADEIAAKAAAVANQGKAK

SEQ ID NO: 6310 - DNA, 747 bp, Borrelia garinii PBi
  CDS (1)..(747): transl_table=11
atgtataaattagttttagtgaggcatggagagagtgaatggaacaaagaaaatctttttactggttggacagatgttaaactttctgacaagggtatcaatgaggctttagaagcaggtttgctcctaaagcaagaaggctattcttttgatattgcttttagttctttattgtcaagggctaatgatactttaaatattattttgcgagaattggggcaatcttatattagtgtaaaaaaaacctggagattaaatgagaggcactatggagctttacaaggtttaaataagtcagaaacagctgcaaaatatggggaaggtaaagttttaatttggagacgcagttatgatgtgcccccaatgtctttagatgagtctgaagatcgtcatccaataaaagatccaagatataaatatattcctaaaagggagcttccttcaacagaatgccttaaagatactgttacaagagttattccttattggactgatgagattgcaaaagaagttcttgggggtaaaaaagttattgttgctgctcatggcaattctttaagagctcttgttaaatatcttgataatttaagcgaagaagatgttttaaagcttaacattcctacgggtattcctttagtttatgaattagataaagatttaaatcctattaaacattactatttaggtgatgaaagtaagattaaaagtgcaatggaatctgttgctagtcaaggaaagttaaagtaa

SEQ ID NO: 6311 - protein, 248 aa, Borrelia garinii PBi
MYKLVLVRHGESEWNKENLFTGWTDVKLSDKGINEALEAGLLLKQEGYSFDIAFSSLLSRANDTLNIILRELGQSYISVKKTWRLNERHYGALQGLNKSETAAKYGEGKVLIWRRSYDVPPMSLDESEDRHPIKDPRYKYIPKRELPSTECLKDTVTRVIPYWTDEIAKEVLGGKKVIVAAHGNSLRALVKYLDNLSEEDVLKLNIPTGIPLVYELDKDLNPIKHYYLGDESKIKSAMESVASQGKLK

SEQ ID NO: 6312 - DNA, 738 bp, Bacillus cereus E33L
  CDS (1)..(738): transl_table=11
atgataaaacttgtacttattcgtcacggacagagtttatggaatcttgaaaatcgttttactggatggacagatgtagatttatcagagaatggattaagtgaagcgagagaggcaggagcgatattaaagaaaaatggatatacttttgatgtagcttatacatctgtattaaaacgagcaattcggacgttatggattgtacttcatgaaatgaatcttgcctgggtaccagtacataaatcttggaagctaaatgaaagacattatggtgcattgcaaggtttgaataaagatgaaaccgcgcaaaaatatggtgaggagcaagttcatatttggagaagaagtattgatgtaagaccacctgctcttactgaggatgatcccaggtatgaaatgaatgatccaagatataaagcactgaaaaaaggtgagtttccattgacagaatgtttagtggatacggagaaaagagtacttgattattggcattcagaaattgcgccgaaattaaagaatggtaacaaagtaatcatttcatcacatggtaacacaattcgctcgctagtaaaatatttagataatctttcaagcgatggtgttgtttcactaaatattccaacgagtataccgctcgtttatgaattagacgaaaatttacgtccgattcgccattattacttaagtatggatggagaagtacctgaaggggaaattccgaaacatatttctttttaa

SEQ ID NO: 6313 - protein, 245 aa, Bacillus cereus E33L
MIKLVLIRHGQSLWNLENRFTGWTDVDLSENGLSEAREAGAILKKNGYTFDVAYTSVLKRAIRTLWIVLHEMNLAWVPVHKSWKLNERHYGALQGLNKDETAQKYGEEQVHIWRRSIDVRPPALTEDDPRYEMNDPRYKALKKGEFPLTECLVDTEKRVLDYWHSEIAPKLKNGNKVIISSHGNTIRSLVKYLDNLSSDGVVSLNIPTSIPLVYELDENLRPIRHYYLSMDGEVPEGEIPKHISF

SEQ ID NO: 6314 - DNA, 684 bp, Mannheimia succiniciproducens MBEL55E
  CDS (1)..(684): transl_table=11
atggaattagtatttattcgtcacggtttaagtgaatggaatgcattaaaccttttcaccggctggagagacgtaaacttaagtgaaaaaggcgtggaagaagcaaaagaagcgggtcgtaaattaaaagccgcaggcttcgaatttgatatcgcgttcacttcagtattaacccgtgcgatcaaaacctgtaacttagtgttagaagaatctaaccaattatgggttccgcaaatcaaaacatggcgtttgaacgaacgccactacggcggtttacaaggtttaaacaaagcggaggcagcggctgaacacggtgacgaacaagttcgtatttggcgccgttcatacgatgtgttaccgccggttttagatccaaaagaccctaactccgcacacaacgaccgtcgttacgcacatttaccggcggatgttgtgcctgattgtgaaaacttaaaagtaactttagaacgcgttttaccattctgggaagatcaaatcgcaccggcaattaaagcgggcaaacgtgttttagttgcggcacacggtaactcattacgcgcacttgcaaaacacattgaaggtatttccgatgcggatatcatggacttggaaatccctaccggtcaacctttagtttatactttagacgacaacttaaaagtagtaagcaaacgctacttataa

SEQ ID NO: 6315 - protein, 227 aa, Mannheimia succiniciproducens MBEL55E
MELVFIRHGLSEWNALNLFTGWRDVNLSEKGVEEAKEAGRKLKAAGFEFDIAFTSVLTRAIKTCNLVLEESNQLWVPQIKTWRLNERHYGGLQGLNKAEAAAEHGDEQVRIWRRSYDVLPPVLDPKDPNSAHNDRRYAHLPADVVPDCENLKVTLERVLPFWEDQIAPAIKAGKRVLVAAHGNSLRALAKHIEGISDADIMDLEIPTGQPLVYTLDDNLKVVSKRYL

SEQ ID NO: 6316 - DNA, 750 bp, Burkholderia mallei ATCC 23344
  CDS (1)..(750): transl_table=11
atgtacaagctcgttctcatccgccacggcgaatcgacgtggaacaaggaaaaccgcttcaccggctgggtcgatgtcgacctgaccgaacaaggcaaccgcgaagcccggcaggcgggccagctcctgaaggaagccggctacacgttcgatatcgcatacacgtcggtgctcaagcgcgcgatccgcacgctctggcacgtgcaggaccagatggatctgatgtacgtgcccgtcgtgcattcgtggcgcctgaacgagcgccattacggcgcgctgtcgggcctgaacaaggcggagacggccgcgaagtacggcgacgagcaggtgctcgtctggcgccgcagctacgacacgccgccgcccgcgctcgagccgggcgacgagcgcgcgccgtacgccgatccgcgctacgcgaaggtgccgcgcgagcagttgccgctcaccgagtgcctgaaggacacggtcgcgcgcgtgctgccgctctggaacgaatcgatcgcgcccgcggtgaaggccggcaagcaggtgctgatcgccgcgcacggcaactcgctgcgcgcgctgatcaagtatctcgacggcatctccgacgcggacatcgtcggcctgaacatcccgaacggcgtgccgctcgtctacgagctcgacgagagcctcacgcccatccggcactactacctcggcgatcaggaggcgatcgcgaaggcgcaggccgccgtcgcgcagcagggcaagtccgcggcgtaa

SEQ ID NO: 6317 - protein, 249 aa, Burkholderia mallei ATCC 23344
MYKLVLIRHGESTWNKENRFTGWVDVDLTEQGNREARQAGQLLKEAGYTFDIAYTSVLKRAIRTLWHVQDQMDLMYVPVVHSWRLNERHYGALSGLNKAETAAKYGDEQVLVWRRSYDTPPPALEPGDERAPYADPRYAKVPREQLPLTECLKDTVARVLPLWNESIAPAVKAGKQVLIAAHGNSLRALIKYLDGISDADIVGLNIPNGVPLVYELDESLTPIRHYYLGDQEAIAKAQAAVAQQGKSAA

SEQ ID NO: 6318 - DNA, 738 bp, Nocardia farcinica IFM 10152
  CDS (1)..(738): transl_table=11
atgacgtacaccctcgtgctgctgcgccacggcgagagcgaatggaacgccctgaacctgttcaccggctgggtggacgtgcacctcaccgacaagggcgtggccgagggcaagcgggccggtgagctgctcgccgagcacgggatcctgcccgacatcgtctacacctcgctgctgcgccgggccatctccaccgccaacatcgccctcgacgccgccgaccggcactggatcccggtcgtgcgggactggcggctcaacgagcggcactacggcgagctgcagggcaagaacaaggcccagatccgcgacaagtacggcgaggagcagttcatgctgtggcggcgcagctacgacaccccgccgccgcccatcgaggcgggcaacgagtacagccaggagggcgacgcccgttacgcgggcatcgacatccccaagaccgagtgcctgctcgacgtggtgaaccggatggtcccctactgggagtcgaccatctccaaggatctgctggcgggcaagaccgtgctgatcgccgcgcacggcaactcgctgcgcgcgctggtcaagcacctcgaccagatctccgacgaggagatcgccggtctgaacatcccgaccggcattccgctgcgctacgaactggacgagaacctgcgtccggtgcgcccccgcgagtacctggacccggaggcggccgccgccggcgcggccgcggtcgcgagccagggcggtaagtaa

SEQ ID NO: 6319 - protein, 245 aa, Nocardia farcinica IFM 10152
MTYTLVLLRHGESEWNALNLFTGWVDVHLTDKGVAEGKRAGELLAEHGILPDIVYTSLLRRAISTANIALDAADRHWIPVVRDWRLNERHYGELQGKNKAQIRDKYGEEQFMLWRRSYDTPPPPIEAGNEYSQEGDARYAGIDIPKTECLLDVVNRMVPYWESTISKDLLAGKTVLIAAHGNSLRALVKHLDQISDEEIAGLNIPTGIPLRYELDENLRPVRPREYLDPEAAAAGAAAVASQGGK

SEQ ID NO: 6320 - DNA, 753 bp, Salmonella enterica subsp. enterica serovar Paratyphi A str. ATCC
  CDS (1)..(753): transl_table=11
atggctgtaactaagctggttctggtacgtcacggtgaaagtcaatggaacaaagagaaccgtttcaccggctggtatgatgttgacctgtctgaaaaaggcgtaagcgaagcaaaagcagcgggtaaactgctaaaagaagaaggtttcagctttgattttgcctacacttccgtactgaaacgcgctatccatacgctgtggaacgtactggatgaactggatcaggcgtggctgccggtggaaaaatcctggaaactcaacgaacgtcactatggcgcgttgcaggggctgaataaagcggaaacggccgaaaaatatggtgacgagcaggttaagcagtggcgccgcggttttgccgtgacgccgccggaactgaccaaagatgatgagcgttatccgggtcacgatccacgttatgccaaactgagcgagaaagagctgccgttgaccgaaagtctggcgctgaccatcgaccgcgttattccttactggaccgacaccatcctgccgcgtatgaagagcggtgagcgcgtgatcatcgccgctcacggtaactcattgcgtgcgctggtgaaataccttgataacatgagtgaagatgagatccttgagttaaacatcccgaccggcgtgccgctggtgtatgagttcgacgaaaacttcaagccgctcaaacattactatctgggcaacgctgacgaaatcgctgcgaaagcggctgccgtggcgaatcagggtaaagcgaagtaa

SEQ ID NO: 6321 - protein, 250 aa, Salmonella enterica subsp. enterica serovar Paratyphi A str. ATCC
MAVTKLVLVRHGESQWNKENRFTGWYDVDLSEKGVSEAKAAGKLLKEEGFSFDFAYTSVLKRAIHTLWNVLDELDQAWLPVEKSWKLNERHYGALQGLNKAETAEKYGDEQVKQWRRGFAVTPPELTKDDERYPGHDPRYAKLSEKELPLTESLALTIDRVIPYWTDTILPRMKSGERVIIAAHGNSLRALVKYLDNMSEDEILELNIPTGVPLVYEFDENFKPLKHYYLGNADEIAAKAAAVANQGKAK

SEQ ID NO: 6322 - DNA, 750 bp, Azoarcus sp. EbN1
  CDS (1)..(750): transl_table=11
atgtacaaaatcgttctgcttcgccatggcgagtctacctggaacaaggacaaccgcttcaccggctggaccgacgtcgatctcaccgagaaaggtgtcgaggaggcccggggagctggccacttgctgaagcgagagggctacactttcgacctggcctacacgtcggtactcaagcgtgccaacaagacgctgaacatcgtcctcgaggaactcgactcgctgtggctgccggtggagcattcgtggcgcctgaacgaacggcattacggcgacttgcaggggctcaacaaggccgagaccgcagcgaaattcggcgacgaccaggtgctcgtgtggcgccgttcatatgacacgccgccgccgccgctgccggagggcgacgaacggctcaccagcggcgacccgcgctatgcttcgctgccgcgcgcgcagttcccgcgcaccgaatgcctcaaggatacggtggcgcgcttcgtgccgtactgggagacggtgatcgtgccgaacatcctggccggtcgccgcatcctgatcgcggcccacggcaacagcctgcgcgcgctgatcaagtatctcgacaacatctcggacagcgaaatcgtcggcctgaacatcccgaccgcgcagccgctcgtctatgagctggacgcgaatctgcgcccgatcaggagctactacctcgcggatgccgacacgatccgcgcggccgaggctgcagtggcgggacagggcaaggcgaagggctga

SEQ ID NO: 6323 - protein, 249 aa, Azoarcus sp. EbN1
MYKIVLLRHGESTWNKDNRFTGWTDVDLTEKGVEEARGAGHLLKREGYTFDLAYTSVLKRANKTLNIVLEELDSLWLPVEHSWRLNERHYGDLQGLNKAETAAKFGDDQVLVWRRSYDTPPPPLPEGDERLTSGDPRYASLPRAQFPRTECLKDTVARFVPYWETVIVPNILAGRRILIAAHGNSLRALIKYLDNISDSEIVGLNIPTAQPLVYELDANLRPIRSYYLADADTIRAAEAAVAGQGKAKG

SEQ ID NO: 6324 - DNA, 693 bp, Lactobacillus acidophilus NCFM
  CDS (1)..(693): transl_table=11
atgtcaaaattagttttaatccgtcacggtcaaagtgaatggaacctttcaaaccaatttactggttgggttgacgttaacctttcagaaaaaggtgttgaagaagctaagaaggctggtcgtttaatcaaggaacacggtcttgaatttgatcaagcttacacttcattattaactcgtgctatcaagactttgcactacgcattggaagaaagtgaccaactttggattccagaaactaagacttggagacttaacgaacgtcactacggtgctcttcaaggcttgaacaagaaggctactgctgaaaagtacggtgatgaacaagttcacatttggcgtcgttcatacgatgttttgccaccagctattgacgatgacaacgaatttagtcaagcacatgaccgtcgttacgcaaacttggatccacacatcgttcctaaggcagaaaacttacacgtaactttggatcgtgtaatgccattctgggaagataacattgctccagacttacttgacggtaagaacgtaattattgctgcacacggtaactcacttcgtgctttgactaagtacattgaaaacatttctgacgatgacatcatggacctcgaaatgaagactggtgaaccagttgtttacactttcgacgaaaacttggatgttgttaacaaggaaaagttggacgactaa

SEQ ID NO: 6325 - protein, 230 aa, Lactobacillus acidophilus NCFM
MSKLVLIRHGQSEWNLSNQFTGWVDVNLSEKGVEEAKKAGRLIKEHGLEFDQAYTSLLTRAIKTLHYALEESDQLWIPETKTWRLNERHYGALQGLNKKATAEKYGDEQVHIWRRSYDVLPPAIDDDNEFSQAHDRRYANLDPHIVPKAENLHVTLDRVMPFWEDNIAPDLLDGKNVIIAAHGNSLRALTKYIENISDDDIMDLEMKTGEPVVYTFDENLDVVNKEKLDD

SEQ ID NO: 6326 - DNA, 750 bp, Xanthomonas oryzae pv. oryzae KACC10331
  CDS (1)..(750): transl_table=11
gtgacccgcaaactcgtactgctgcgccatggccagagccaatggaatctggacaaccgtttcaccggctgggtggatgtggaactcaccgaccagggccgccaggaagctgtggcggccggcaagctgatgaaggacgaagggctgcagttcgatgtcgcccacacctcggtgctcaagcgcgccatccacacgctgcagggcgcgttgaaggaactcgaccaggactggttgccggtgtccaagagctggcgcctcaacgagcgccactacggcggcctgcaaggcctggacaaggccgaaaccgcggccaagcacggcgaggagcaggtcaagatctggcgccgttcgtacgacatcccgccgccggccatggacgtcgacgacccggggcacccgtgtcacgaccgtcgctacgccacgctcgatcgcaatgcgttgccgggcaccgagtcgctggcgaccacgttggtgcgcgtgttgccgtattggcacgacgcgattgcgccgcagttgaaggccgggcagaccgtgctggtgaccgcgcacggcaactcgctgcgtgcgctgtacaagtacctcaacgatgtctccaacgaacagattctggagctcaatatccccaccggcatcccgctgttgttcgagctggacgacaatctgcaggtgcgcagcttccgttatctgggcgatccggaagcggccaagcgtgcggccgaggcagtagccaaccagggcaaggcgaagtaa

SEQ ID NO: 6327 - protein, 249 aa, Xanthomonas oryzae pv. oryzae KACC10331
MTRKLVLLRHGQSQWNLDNRFTGWVDVELTDQGRQEAVAAGKLMKDEGLQFDVAHTSVLKRAIHTLQGALKELDQDWLPVSKSWRLNERHYGGLQGLDKAETAAKHGEEQVKIWRRSYDIPPPAMDVDDPGHPCHDRRYATLDRNALPGTESLATTLVRVLPYWHDAIAPQLKAGQTVLVTAHGNSLRALYKYLNDVSNEQILELNIPTGIPLLFELDDNLQVRSFRYLGDPEAAKRAAEAVANQGKAK

SEQ ID NO: 6328 - DNA, 684 bp, Neisseria gonorrhoeae FA 1090
  CDS (1)..(684): transl_table=11
atggaattggtatttatccgccacggacaaagcgaatggaacgcgaaaaacctgtttacaggctggcgcgacgtgaagctgagcgagcaggggcttgccgaggccgccgccgccggtaaaaaactgaaagaaaacggctatgagttcgacatcgccttcacatccgtcctgacccgcgcgattaagacctgcaacatcgttttggaagaatccgaccaactgttcgtaccgcaaatcaaaacatggaggctgaacgaacgccactacggccgactgcaaggtttggacaaaaaacaaaccgccgaaaaatacggcgacgagcaagtccgcatctggcggcgcagctacgacaccctgccgccgcttttggacaaagacgacgcgttttccgcacacaaagaccgtcgctatgcccatctgcctgccgatgtcgtacccgacggcgaaaacctgaaagtaacgctggagcgcgtattaccgttttgggaagaccaaatcgcccccgcgattttgagcggcaaacgcgtcttggtagcggcgcacggcaactccctgcgcgcgctggcaaaacacatcgagggcatttccgacgaagacatcatgggcttggaaatcccgaccggccagccgctggtgtacaaattagacgacaacctgaaagtcatcgagaaattttacctgtaa

SEQ ID NO: 6329 - protein, 227 aa, Neisseria gonorrhoeae FA 1090
MELVFIRHGQSEWNAKNLFTGWRDVKLSEQGLAEAAAAGKKLKENGYEFDIAFTSVLTRAIKTCNIVLEESDQLFVPQIKTWRLNERHYGRLQGLDKKQTAEKYGDEQVRIWRRSYDTLPPLLDKDDAFSAHKDRRYAHLPADVVPDGENLKVTLERVLPFWEDQIAPAILSGKRVLVAAHGNSLRALAKHIEGISDEDIMGLEIPTGQPLVYKLDDNLKVIEKFYL

SEQ ID NO: 6330 - DNA, 747 bp, Bacteroides fragilis NCTC 9343
  CDS (1)..(747): transl_table=11
atgaaaaagattgtattgctccgtcatggagaaagtgcatggaacaaagagaaccgttttaccggttggacagatgtcgatctgacagaaaaaggaattgccgaagcctgtaaagcaggcgaactactgaaagagaatggatttaacttcgataaagcttatacgtcataccttaaacgagcggtgaaaacgctgaattgcgtactcgaccggatggatcaggactggattccggtagagaaaagctggcgcctgaatgaaaaacattacggcgatctgcaaggactgaacaaaagcgaaacagccgctaaatacggggatgaacaggtgcttatctggcgcaggagttatgatatagctcccaatgccctgtcggaagacgatccgagaaatccccgctttgagaatcgttatcaggaagtacccgatgcggaacttccccggacagaatctctgaaagataccatcgaacgtatcatgccttattggaagtgtatcatcttcccgaatctgaaaacggctgatgaaattctggttgttgcccacggaaatagtttgcgcggcatcatcaagcacttgaagcacatctccgatgaagagatcgtaaaactgaatctgccgactgccgtcccttacgtatttgagttcagtgacgaactgaatctggaaaaagactatttcctgggtgatcccgaagaaatccgtaagttgatggaagcggttgccaaccagggaaagaaaaaataa

SEQ ID NO: 6331 - protein, 248 aa, Bacteroides fragilis NCTC 9343
MKKIVLLRHGESAWNKENRFTGWTDVDLTEKGIAEACKAGELLKENGFNFDKAYTSYLKRAVKTLNCVLDRMDQDWIPVEKSWRLNEKHYGDLQGLNKSETAAKYGDEQVLIWRRSYDIAPNALSEDDPRNPRFENRYQEVPDAELPRTESLKDTIERIMPYWKCIIFPNLKTADEILVVAHGNSLRGIIKHLKHISDEEIVKLNLPTAVPYVFEFSDELNLEKDYFLGDPEEIRKLMEAVANQGKKK

SEQ ID NO: 6332 - DNA, 753 bp, Salmonella enterica subsp. enterica serovar Choleraesuis str
  CDS (1)..(753): transl_table=11
atggctgtaactaagctggttctggtacgtcacggtgaaagtcaatggaacaaagagaaccgtttcaccggctggtatgatgttgacctgtctgaaaaaggcgtaagcgaagcaaaagcagcaggtaaactgctaaaagaagaaggtttcagctttgattttgcctacacttccgtactgaaacgcgctatccatacgctgtggaacgtactggatgaactggatcaggcgtggctgccggtggaaaaatcctggaaactcaacgaacgtcactatggcgcgttgcaggggctgaataaagcggaaacggccgaaaaatatggtgacgagcaggttaagcagtggcgccgcggttttgccgtaacgccgccggaactgaccaaagatgatgagcgttatccgggtcacgatccacgttatgccaaactgagcgagaaagagctgccgttgaccgaaagtctggcgctgaccatcgaccgcgttattccttactggaacgacaccatcctgccgcgtatgaagagcggtgagcgcgtgatcatcgccgctcacggtaactcattgcgtgcgctggtgaaatacctggataacatgagtgaagatgagattcttgaattaaacatcccgaccggcgtgccgctggtgtatgagttcgacgaaaacttcaagccgatcaaacattactatctgggtaacgctgacgagatcgctgcgaaagcggctgccgtggcgaatcagggtaaagcgaagtaa

SEQ ID NO: 6333 - protein, 250 aa, Salmonella enterica subsp. enterica serovar Choleraesuis str
MAVTKLVLVRHGESQWNKENRFTGWYDVDLSEKGVSEAKAAGKLLKEEGFSFDFAYTSVLKRAIHTLWNVLDELDQAWLPVEKSWKLNERHYGALQGLNKAETAEKYGDEQVKQWRRGFAVTPPELTKDDERYPGHDPRYAKLSEKELPLTESLALTIDRVIPYWNDTILPRMKSGERVIIAAHGNSLRALVKYLDNMSEDEILELNIPTGVPLVYEFDENFKPIKHYYLGNADEIAAKAAAVANQGKAK

SEQ ID NO: 6334 - DNA, 684 bp, Chlamydophila abortus S26/3
  CDS (1)..(684): transl_table=11
atggcctttcttatcttattacgacacgggaaatccgtctggaatgaaaaaaacctttttacaggatgggtggatattcccctaagtcaaaaaggtattgacgaagcaatgcttgcaggcgaagccatcaaagaccttcccatagattgcatctttacctcctctcttgtgcgaagtttaatgacggcattgcttgctatgacgcatcacaactctaaaaaaatcccttacattgttcacgatgatcctgaacaaaagcacatgagtaagatctatagtgatgaagtcaaccacatgatcccactgtaccgttctagcgcactcaatgaaagaatgtacggggaactccaaggaaaaaataaaaaaaaaaccgctgagcaatttggggaggagcaagtaaaattgtggcgacgtagttataagaccgcccctcctaatggcgaaagtctttatgatactgggcaacgcaccatcccctattttcaggaaactattttccctttgttgcagaattcaaaaaatgtatttgtatctgcacatggaaattccttacgttcactcattatggatatagaaaaattaagtgaagaagaggtacactccttggagttacctacaggaaaacccatagtatatttatggaccggtcacacattcgaacgacatccagagttatttggttaa

SEQ ID NO: 6335 - protein, 227 aa, Chlamydophila abortus S26/3
MAFLILLRHGKSVWNEKNLFTGWVDIPLSQKGIDEAMLAGEAIKDLPIDCIFTSSLVRSLMTALLAMTHHNSKKIPYIVHDDPEQKHMSKIYSDEVNHMIPLYRSSALNERMYGELQGKNKKKTAEQFGEEQVKLWRRSYKTAPPNGESLYDTGQRTIPYFQETIFPLLQNSKNVFVSAHGNSLRSLIMDIEKLSEEEVHSLELPTGKPIVYLWTGHTFERHPELFG

SEQ ID NO: 6336 - DNA, 684 bp, Haemophilus influenzae 86-028NP
  CDS (1)..(684): transl_table=11
atggaattagtatttatccgtcacggttttagtgaatggaatgcgaaaaacttattcacaggctggcgtgatgtgaatttaactgaacgtggtgtggaagaagcaaaagctgcgggtaaaaaactgttagacaaaggttatgaatttgatatcgcatttacctctgttttaactcgagcaatcaaaacttgtaatatcgtgttagaagaatcccatcaattatggattccgcaagtaaaaaactggcgtttaaatgaacgtcattatggtgctttacaaggtttagataaaaaagcgactgcggagcaatacggtgacgaacaagttcatatttggcgtcgttcttatgacatttctccaccagatttagatccacaagatccaaattctgcacacaatgaccgtcgctacgcaaatattccatctgatgttgtgccaaacgcagaaaatttaaaattaacattagaacgcgcattaccattctgggaagatcaaattgcaccagcaatgctttctggcaaacgtgttttagtagttgctcacggtaattcacttcgtgcgttggcaaaacatattatcggtatttctgatgctgaaattatggattttgaaattccaacaggtcagcctttagttttaaaacttgatgataaattaaattacgtagaacattactatctttaa

SEQ ID NO: 6337 - protein, 227 aa, Haemophilus influenzae 86-028NP
MELVFIRHGFSEWNAKNLFTGWRDVNLTERGVEEAKAAGKKLLDKGYEFDIAFTSVLTRAIKTCNIVLEESHQLWIPQVKNWRLNERHYGALQGLDKKATAEQYGDEQVHIWRRSYDISPPDLDPQDPNSAHNDRRYANIPSDVVPNAENLKLTLERALPFWEDQIAPAMLSGKRVLVVAHGNSLRALAKHIIGISDAEIMDFEIPTGQPLVLKLDDKLNYVEHYYL

SEQ ID NO: 6338 - DNA, 765 bp, Corynebacterium jeikeium K411
  CDS (1)..(765): transl_table=11
atgagcgagcaaaacaactcccacggaaatctgattctgctgcgtcacggccagagtgaatggaatgcctccaaccagttcaccggctgggtagacgtgcgactgactgagaagggccgcgcggaggcagtccgcggcggcgagatgatcaaggaggccggcctggagccgaccatcctgtacacctccctgctgcgtcgcgccatcaccaccgccaacatcgccctcgatgcggcggatcgccactggatccccgtcgtgcgcgactggcgcctgaacgagcgccactacggcgctctgcaggggctgaacaaggcagagaccaaggacaaatacggcgaagagcagttcatggcatggcgccgttcctacgacactccgccaccggccatcgacgctgacaacgagtacgcgcagaccaacgacccgcgctacgccgacctgtccgagattccagccaccgagtgcctgctggacgtcgtgaagcgcttcatcccctactacgaggaagagattgagccgcgcgtgaagaacggcgagaccgtcctggtcgccgcgcacggcaactccctgcgtgcgctggttaagcacctggacaagatctctgacgaagacattgcgggcctgaacatcccaaccggcatcccgctggtctacaacatcgacgcagacggcaaggttctgaacccaggtggcgactacctggacccggaggcagccgccgcgggtgccgcagcagtcgctgcacagggccaggctaagtaa

SEQ ID NO: 6339 - protein, 254 aa, Corynebacterium jeikeium K411
MSEQNNSHGNLILLRHGQSEWNASNQFTGWVDVRLTEKGRAEAVRGGEMIKEAGLEPTILYTSLLRRAITTANIALDAADRHWIPVVRDWRLNERHYGALQGLNKAETKDKYGEEQFMAWRRSYDTPPPAIDADNEYAQTNDPRYADLSEIPATECLLDVVKRFIPYYEEEIEPRVKNGETVLVAAHGNSLRALVKHLDKISDEDIAGLNIPTGIPLVYNIDADGKVLNPGGDYLDPEAAAAGAAAVAAQGQAK

SEQ ID NO: 6340 - DNA, 687 bp, Staphylococcus haemolyticus JCSC1435
  CDS (1)..(687): transl_table=11
atgccaaaattaatattatgtcgtcatggtcaaagtgaatggaatgctaaaaatttatttacaggatgggaagatgttcaactatctgaacaaggacgaaatgaagcaattacttctggacgtaaactaaaagaaaatggcattgaaattgatgtggcgtttacttcattgttaacgagagcattagagacaactcaatttttattagctgaatcagatcaagagtggattccagtgcataaaagttggcgtttaaatgagcgtcattatggtaaattacaaggtcttaataaagatgaagcacgaaaagaatttggtgaagaacaagtgcatcaatggcgacgttcatatgacgttaagccaccagcacaaactgaagaacaacgtgaatcatatttaaaagatcgtcgttatagacatttagatcatcgtatgatgccttattctgaaagtttaaaaacaacgttagaacgtgtggtacctatatggacagataagatttctcaacatctattagatggagaaacagttctagtagctgcacacggtaattcaatccgcgcattaattaaatatttagataatgtatctgatgaagatatcattggctatgaaattaaaactggtgcaccacttatttatgaattagatgacaatttaaatgtcattgatcattattatttataa

SEQ ID NO: 6341 - protein, 228 aa, Staphylococcus haemolyticus JCSC1435
MPKLILCRHGQSEWNAKNLFTGWEDVQLSEQGRNEAITSGRKLKENGIEIDVAFTSLLTRALETTQFLLAESDQEWIPVHKSWRLNERHYGKLQGLNKDEARKEFGEEQVHQWRRSYDVKPPAQTEEQRESYLKDRRYRHLDHRMMPYSESLKTTLERVVPIWTDKISQHLLDGETVLVAAHGNSIRALIKYLDNVSDEDIIGYEIKTGAPLIYELDDNLNVIDHYYL

SEQ ID NO: 6342 - DNA, 717 bp, Candidatus Pelagibacter ubique HTCC1062
  CDS (1)..(717): transl_table=11
atgactcatttaattttagtaagacatggtcaaagtgaatggaatcttgaaaaaagatttacaggctgggtagatgttgaccttacagggcaaggtaaattggaagcctgtaaagctggagagtatattaaggaaactaaaattgatattgattatttttattcatcatttcagttaagggctatcaatacactaaaatttattcaggacacattaagagataaaagagaaccagttaaagcttggcaattaaatgaaagacattatggagctttaacggggctaaataaagatgaaatgaaagaaaagcttggtgaagataaaatacatgcttttagaagatcttgggatattaaaccagatccattaaatagaaataatccgtatcacccgttaaatatagaggtttataaaagtattccaaaagaaaatattcctgacaccgagtcccttaaagatacctacgatagagtaatgaagttttatattgatgaaattcaaatgaaactaaaaaatgataaaaacattttaatttcagctcatgggaattctataagagcgttatgcaaatttttatttaaattagacaatcaaaggataacattactcgaaataccaacaggcaatccacttttgataaatttagattcaaagcaaaatattaaagaatgcacttacctagatcaagatagagctaaggacttgttagttttttaa

SEQ ID NO: 6343 - protein, 238 aa, Candidatus Pelagibacter ubique HTCC1062
MTHLILVRHGQSEWNLEKRFTGWVDVDLTGQGKLEACKAGEYIKETKIDIDYFYSSFQLRAINTLKFIQDTLRDKREPVKAWQLNERHYGALTGLNKDEMKEKLGEDKIHAFRRSWDIKPDPLNRNNPYHPLNIEVYKSIPKENIPDTESLKDTYDRVMKFYIDEIQMKLKNDKNILISAHGNSIRALCKFLFKLDNQRITLLEIPTGNPLLINLDSKQNIKECTYLDQDRAKDLLVF

SEQ ID NO: 6344 - DNA, 699 bp, Candidatus Blochmannia pennsylvanicus str. BPEN
  CDS (1)..(699): transl_table=11
atgcatataactaaattagttttaataagacacggagaaagtcaatggaacaaagaaaatagattcactggatgggttgatgtagacttatcagaaaaaggacgttctgaagcgcaatgcgctggtagaatattaaaaaaaaatggatttttttttaattatggatatacttcagtattaaaacgagcaattcatactttatggatcatattagatcaattagatcaagcatggctaccaatagaaaaatcttggcgactcaatgaacgtcattatggggcactgcaaggattaaataaagatgaagccataaaagaatatggatacaaaacaattcaaaaatggcgtcgtagtttcaatgttattcctccaaatatttgtggtggaaataatcagtttattgcaacaaatgacaatcgttatgctaacatcagtactgatgaattacctagtagtgaaagtttagaactaaccttaaaaagagtaatcccttattggaaccaatccataatacctcatatcaaaaaaggtcaaacaattattatcgttgcccatggaaattctatacgcgctataataaagtttctcaatcacttaaatgaatcagaaatatttcaaattaatgtgccaacaggtgttccgctaatatatgaatttgacaaaaaagcaaatactgttcaacattattatttaaaataa

SEQ ID NO: 6345 - protein, 232 aa, Candidatus Blochmannia pennsylvanicus str. BPEN
MHITKLVLIRHGESQWNKENRFTGWVDVDLSEKGRSEAQCAGRILKKNGFFFNYGYTSVLKRAIHTLWIILDQLDQAWLPIEKSWRLNERHYGALQGLNKDEAIKEYGYKTIQKWRRSFNVIPPNICGGNNQFIATNDNRYANISTDELPSSESLELTLKRVIPYWNQSIIPHIKKGQTIIIVAHGNSIRAIIKFLNHLNESEIFQINVPTGVPLIYEFDKKANTVQHYYLK

SEQ ID NO: 6346 - DNA, 744 bp, Thermobifida fusca YX
  CDS (1)..(744): transl_table=11
atgtcgactctggttctgctgcgccacggcgaaagcgtgtggaacgctgaagggctgttcaccggctgggtggacgtggacctgtccccgaaaggcgaagaggaagcccgccgcgggggcaggctgctggccgaggcgggaatccgccccgatgtggtccacacctccctgctgaagcgggccatccgcaccgccaacatcgcgcttgaggaggccggactgcactggattccggtcaagcgctcctggcggctcaacgaacgccactacggcgccctccaaggaaagaacaaggcgcagacccgcgccgaattcggtgacgagcagttcatgatctggcggcgttcctacgacacgcctccgccgccgctcgccgaagacagcgagttctcgcagcacaacgacccgcgttacgccaccctgccccccgagctgatgccgcgcaccgaatgcctggcagacgtcgtgcggcggatgctgccctactggtacgacgcgatcatccccgacctggctgcgggacgcaccgtgctggtcgcggcgcacggcaactcgctgcgcgccctggtcaagcacctggacaacatcgacgacaagagcatcgccgggctcaacatccccaccggtatcccgctggtgtacgagctcaacgacgacttcactccgcggaagacgggcggcgagtacctggaccccgaggcggccaaagaggccatcgaagcggtcaagaaccagggcaagtag

SEQ ID NO: 6347 - protein, 247 aa, Thermobifida fusca YX
MSTLVLLRHGESVWNAEGLFTGWVDVDLSPKGEEEARRGGRLLAEAGIRPDVVHTSLLKRAIRTANIALEEAGLHWIPVKRSWRLNERHYGALQGKNKAQTRAEFGDEQFMIWRRSYDTPPPPLAEDSEFSQHNDPRYATLPPELMPRTECLADVVRRMLPYWYDAIIPDLAAGRTVLVAAHGNSLRALVKHLDNIDDKSIAGLNIPTGIPLVYELNDDFTPRKTGGEYLDPEAAKEAIEAVKNQGK

SEQ ID NO: 6348 - DNA, 747 bp, Ralstonia eutropha JMP134
  CDS (1)..(747): transl_table=11
atgtacaagctagtcctcatccgccacggcgaatcgacgtggaacctcgaaaaccgcttcaccggctgggtcgacgtcgacctgactgacaccggcgccgcgcaagcccgcctggccggcaagctgctcaaggaagccggcttcgccttcgacgtggcctacacgtccgtgctcaagcgcgcgatccgtacgctgtggcacgtgcaggacgaaatggacgagatgtggatcccggtacgcaacgaatggcgcctgaacgagcgccactacggtgcgctggccggcctgaacaaggcagaaaccgccgccaagttcggcgacgagcaggtgctcgtgtggcgccgcagctacgacacgccgccgcccgcgctggagccgaccgatccgcgtgcctcttacgacgatccgcgctacgccaatgtgccgcgcgagcagattccgctgaccgaatgcctgaaggacaccgtggcccgcgtgctgccgctgtggaacgaatccatcgctccggacatccaatcgggcaagcgcgtggtcattgccgctcacggcaacagcatccgcgccctggttaagtacctggatcagatttcggatgacgatatcgtcggcctcaacatccccaatggcaccccgctcgtctacgagctggacgccagcctgcgcccgctgcgccactattacctgggcgaccaggaagccatcgccgcctcgctggcggccgtggccagccagggcaaggcccgctga

SEQ ID NO: 6349 - protein, 248 aa, Ralstonia eutropha JMP134
MYKLVLIRHGESTWNLENRFTGWVDVDLTDTGAAQARLAGKLLKEAGFAFDVAYTSVLKRAIRTLWHVQDEMDEMWIPVRNEWRLNERHYGALAGLNKAETAAKFGDEQVLVWRRSYDTPPPALEPTDPRASYDDPRYANVPREQIPLTECLKDTVARVLPLWNESIAPDIQSGKRVVIAAHGNSIRALVKYLDQISDDDIVGLNIPNGTPLVYELDASLRPLRHYYLGDQEAIAASLAAVASQGKAR

SEQ ID NO: 6350 - DNA, 687 bp, Staphylococcus saprophyticus subsp. saprophyticus ATCC 15305
  CDS (1)..(687): transl_table=11
atgccaaaattaattttatgtagacatggacaaagtgtgtggaatgcagaaaacctatttacaggatgggcagatgttgatctatcagaacagggcgaaaatgaagccataacatctggtaaaaaattaaaagcacaaggcattgaaatcgatatagtttatacatctttactcgaacgtgcgattaaaacaacttatcacttattaaatgaatctaatcaattatttattcctataattaaatcttggagattaaatgaaagacattatggtggtttacaaggactaaataaagatgatgcacgtaaaaagtttggtgaagatcaagtacatatttggagacgttcatatgatgttgcaccgccaaaacaagatgaagcacaacgagaaagttatttaaatgaccgtaaatatgaacatttggatagacgtgtcatgcctgaatctgaaagcctaaaagatacgttagtaagagtgataccgtattggaacgatcaaatttctcaacaacttttagatggtaaaacagtgttagtatcagctcatggtaattcattacgtgcattgattaagtatttagagaatgtttctgatgaagatatcgttggatatgaaattaaaacaggtgcaccattaatatatgaacttacagatgacttacaagttatagacaaatattacttataa

SEQ ID NO: 6351 - protein, 228 aa, Staphylococcus saprophyticus subsp. saprophyticus ATCC 15305
MPKLILCRHGQSVWNAENLFTGWADVDLSEQGENEAITSGKKLKAQGIEIDIVYTSLLERAIKTTYHLLNESNQLFIPIIKSWRLNERHYGGLQGLNKDDARKKFGEDQVHIWRRSYDVAPPKQDEAQRESYLNDRKYEHLDRRVMPESESLKDTLVRVIPYWNDQISQQLLDGKTVLVSAHGNSLRALIKYLENVSDEDIVGYEIKTGAPLIYELTDDLQVIDKYYL

SEQ ID NO: 6352 - DNA, 753 bp, Shigella sonnei Ss046
  CDS (1)..(753): transl_table=11
atggctgtaactaagctggttctggttcgtcatggcgaaagtcagtggaacaaagaaaaccgtttcaccggttggtacgacgtggatctgtctgagaaaggcgtaagcgaagcaaaagcagcaggtaagctgctgaaagaggaaggttacagctttgactttgcttacacttctgtgctgaaacgcgctatccataccctgtggaatgtgctggacgaactggatcaggcatggctgcccgttgagaaatcctggaaactgaacgaacgtcactacggtgcgttgcagggtctgaacaaagcggaaaccgccgaaaagtatggcgacgagcaggtgaaacaatggcgtcgtggttttgccgtgactccgccggaactgactaaagatgatgagcgttatccgggtcacgatccgcgttacgcgaaactgagcgagaaagagctgccgctgactgaaagcctggcgctgaccattgaccgcgtgatcccttactggaatgaaactattctaccgcgtatgaagagcggtgagcgcgtgatcatcgctgcacacggtaactctttacgtgcgctggtgaaatatcttgataacatgagtgaagaagagattcttgagctgaatatcccgaccggcgtgccgctggtgtatgagttcgacgagaatttcaaaccgctgaaacgctattatctgggtaatgctgacgagatcgcagcgaaagcagcggcggttgctaaccagggtaaagcgaagtaa

SEQ ID NO: 6353 - protein, 250 aa, Shigella sonnei Ss046
MAVTKLVLVRHGESQWNKENRFTGWYDVDLSEKGVSEAKAAGKLLKEEGYSFDFAYTSVLKRAIHTLWNVLDELDQAWLPVEKSWKLNERHYGALQGLNKAETAEKYGDEQVKQWRRGFAVTPPELTKDDERYPGHDPRYAKLSEKELPLTESLALTIDRVIPYWNETILPRMKSGERVIIAAHGNSLRALVKYLDNMSEEEILELNIPTGVPLVYEFDENFKPLKRYYLGNADEIAAKAAAVANQGKAK

SEQ ID NO: 6354 - DNA, 768 bp, Bombyx mori
  CDS (1)..(768)
atgcctgcaaagtataagattgttatgattcgtcatggcgaatccgaatggaaccagaagaatctcttctgtggatggttcgacgctgacctcagcgacaaaggtcgtcaagaagctgttgctgccgggaaggccttaaaagctgaaggctatcagtttgacgttgctcacacgtctgttctaaaacgtgcccagattacactgaactctatcttaaaggagatcggtcagccagatatacctattgagaaaacttggagattgaacgagaggcattatggtggcctcactggactgaacaaggctgagacagctgccaaatacgggggggctcaggttcaaatctggcgccgtagcttcgacgttcctccaccggccatggaaaaagatcacccatactatgacaccattgttaatgaccccagatatgctgctgacccgaaacctgaagagttccctatgtacgagagcctgaaactcactattgaaagaaccctgccttactggaacaatgttattgtgcctcagatcaaagaaggcaagaagatcattattgctgcccatggcaacagtctaaggggtattgtgaaacacttagatgatctaagcgatgcagcaatcatggaattgaatctgccgacaggcatccccttcgtatatgaacttgatgagaatttaaaacctgtagattccatggtgttccttggtgatgaagaaactgtcaaaaaagctatggctgctgtcgctgcccagggcaaggccaagtga

SEQ ID NO: 6355 - protein, 255 aa, Bombyx mori
MPAKYKIVMIRHGESEWNQKNLFCGWFDADLSDKGRQEAVAAGKALKAEGYQFDVAHTSVLKRAQITLNSILKEIGQPDIPIEKTWRLNERHYGGLTGLNKAETAAKYGGAQVQIWRRSFDVPPPAMEKDHPYYDTIVNDPRYAADPKPEEFPMYESLKLTIERTLPYWNNVIVPQIKEGKKIIIAAHGNSLRGIVKHLDDLSDAAIMELNLPTGIPFVYELDENLKPVDSMVFLGDEETVKKAMAAVAAQGKAK

SEQ ID NO: 6356 - DNA, 624 bp, Nitrobacter winogradskyi Nb
  CDS (1)..(624): transl_table=11
atgagcgaacgtcttctggtgctcgtgcgtcacggccagagcgaatggaatctgaaaaacctgttcacaggctggaaggatccggatctgacggagttgggcgcggctgaggcgaaggatgcggggcgcaagctgaaggcgcagggctttgttttcgacatcgccttcacctcgacgttgatccgtgcccagcacacgctcgatcttgtgctcaaggaactggaccagaccgggattccggtcaggaaagaccaggcgctgaacgagcgtgactatggcgatctttcgggcctcaacaaggatgaggcccgcaagaagtggggcgacgaacaggtgctggtgtggcgccggtcgtatgacgtaccgccgcccggcggcgagagcctgaaggatacgctggcgcgcacgctgccgtacttcgtgcaggaaatcctgccatgcgttcttcgcggcgagtgcacgctcgtggcggcgcacggcaactcgctgcgcgcgctcgtcatggttctggaaaaactgtcgccggaacagattctcgcgcgcgaactggcgaccggcgcgcccgtgatctatcggctcaacgccgatgcgacggtggcatcgaaactggatctcgcggcctga

SEQ ID NO: 6357 - protein, 207 aa, Nitrobacter winogradskyi Nb
MSERLLVLVRHGQSEWNLKNLFTGWKDPDLTELGAAEAKDAGRKLKAQGFVFDIAFTSTLIRAQHTLDLVLKELDQTGIPVRKDQALNERDYGDLSGLNKDEARKKWGDEQVLVWRRSYDVPPPGGESLKDTLARTLPYFVQEILPCVLRGECTLVAAHGNSLRALVMVLEKLSPEQILARELATGAPVIYRLNADATVASKLDLAA

SEQ ID NO: 6358 - DNA, 765 bp, Bos taurus
  CDS (1)..(765)
atggccgcctacaagctggtgctgatccggcacggtgagagcacatggaacctggagaaccgtttcagcggctggtacgacgcggacctgagcccagccgggcacgaggaggcgaagcgaggcgggcaggcgctgagagatgctggctatgagtttgacatctgcttcacctcagtgcagaagagagcaatccggaccctctggacagtgctggatgccattgaccaaatgtggctgccagtggtgaggacttggcgccttaatgagcgacactatgggggtctgactggcctcaataaggcagaaactgctgccaagcatggtgaggcccaggtaaagatctggaggcgctcctatgatgtcccgccacctcccatggagcccgaccatcccttctacagcaacatcagtaaggatcgcaggtacgcagaccttactgaagaccagctgccctcctgtgagagtctgaaggacacaattgccagagctctgcccttttggaatgaagaaattgtcccccagatcaaggaggggaaacgggtactaattgcagcccatggcaacagcctccggggcatcgtcaagcatctggagggtctctctgaagaggctatcatggagctgaacctgccgactggcattcccatggtctatgagttggacaagaacttgaagcccatcaagcccatgcagttcctgggggatgaggagaccgtgcgtaaagccatggaggctgtggctgcccagggcaaggccaagaagtga

SEQ ID NO: 6359 - protein, 254 aa, Bos taurus
MAAYKLVLIRHGESTWNLENRFSGWYDADLSPAGHEEAKRGGQALRDAGYEFDICFTSVQKRAIRTLWTVLDAIDQMWLPVVRTWRLNERHYGGLTGLNKAETAAKHGEAQVKIWRRSYDVPPPPMEPDHPFYSNISKDRRYADLTEDQLPSCESLKDTIARALPFWNEEIVPQIKEGKRVLIAAHGNSLRGIVKHLEGLSEEAIMELNLPTGIPMVYELDKNLKPIKPMQFLGDEETVRKAMEAVAAQGKAKK

SEQ ID NO: 6360 - DNA, 780 bp, Bos taurus
  CDS (1)..(780)
atgtccaagtacaaactgattatgttaagacatggagagggtgcctggaataaagagaaccgcttttgtagctgggtggatcagaaactcaacagtgatggactacaggaagcgcggaactgtgggaagcaactcaaagcactaaactttgagtttgatctcgtgttcacatccatcctgaaccggtctatccacacagcctggctgatcctggaagagctggggcaggagtgggttcctgtggagagctcctggcgtctcaacgagcgtcactacggagccttgatcagtctcaacagggagcagatggcattgaatcatggcgaggagcaggtgaggctgtggagaaggagctacaacgtgacccctcctcccatcgaggagtcccatccttactaccatgaaatctacaacgaccggaaatataaagtgtgtgatgtgcctttggatcagctgccacgatccgagagcttaaaggatgttctggagagactccttccctattggaatgagaggattgctcctgaagtattgcgtggtaaaaccgttctgatatctgctcaaggaaatagctgccgggcactcctgaaatatctggaaggtatctcggatgaagaaattatcaacattactcttcctactggggtccccattctcctggaactggacgagaacctgcgtactgttgggcctcaccagttcctgggcgaccaagaggctatccaagcagccattaagaaagttgacgatcaaggaaaagtgaaacgagctgacaaataa

SEQ ID NO: 6361 - protein, 259 aa, Bos taurus
MSKYKLIMLRHGEGAWNKENRFCSWVDQKLNSDGLQEARNCGKQLKALNFEFDLVFTSILNRSIHTAWLILEELGQEWVPVESSWRLNERHYGALISLNREQMALNHGEEQVRLWRRSYNVTPPPIEESHPYYHEIYNDRKYKVCDVPLDQLPRSESLKDVLERLLPYWNERIAPEVLRGKTVLISAQGNSCRALLKYLEGISDEEIINITLPTGVPILLELDENLRTVGPHQFLGDQEAIQAAIKKVDDQGKVKRADK

SEQ ID NO: 6362 - DNA, 780 bp, Mus musculus
  CDS (1)..(780)
atgtccaagcacaaacttattatactaagacatggagagggccaatggaataaggagaaccgattctgtagttgggtggaccagaaacttaacaacgacggactggaggaggctcggaactgtgggaggcagctcaaagctctcaacttcgagtttgatcttgtcttcacatccatccttaacaggtccattcacacagcctggctgatcctggaagagctggggcaggagtgggtgcctgtggagagctcctggcgtctgaatgagcgtcactatagagccttgattggcctcaacagggagaaaatggctttgaatcatggtgaagagcaggtaaggctctggaggagaagctacaacgtgaccccacctcctatagaggagtctcatccctacttccacgagatctacagtgaccggaggtacaaagtgtgcgatgtgcccttggatcaactgccacgttcagaaagcttgaaggatgttctggagagacttcttccctactggaaggaaaggattgctccggaaatcttaaagggcaaaagcattctgatatctgctcacgggaatagcagtagagctctcctgaaacatctggaaggtatctcagacgaggatattatcaacatcactctgcccactggagttccgattctgctggagttggatgagaacctgcgtgccgttgggcctcaccagttcctgggcaaccaggaggccatccaggcagccattaagaaagtggatgatcaagggaaagtgaaacaaggcaaacaataa

SEQ ID NO: 6363 - protein, 259 aa, Mus musculus
MSKHKLIILRHGEGQWNKENRFCSWVDQKLNNDGLEEARNCGRQLKALNFEFDLVFTSILNRSIHTAWLILEELGQEWVPVESSWRLNERHYRALIGLNREKMALNHGEEQVRLWRRSYNVTPPPIEESHPYFHEIYSDRRYKVCDVPLDQLPRSESLKDVLERLLPYWKERIAPEILKGKSILISAHGNSSRALLKHLEGISDEDIINITLPTGVPILLELDENLRAVGPHQFLGNQEAIQAAIKKVDDQGKVKQGKQ

SEQ ID NO: 6364 - DNA, 696 bp, Macaca fascicularis
  CDS (1)..(696)
atgtccaagtacaaacttattatgttaagacatggtgagggtgcttggaataaggagaaccgtttttgtagctgggtggatcagaaactcaacagtgaaggcatggaggaagctcggaactgtgggaagcaactcaaagcattaaactttgagtttgatcttgtattcacatctgtccttaatcggtccattcacacagcctggctgatcctagaagagctagggcaggaatgggtgcccgtggaaagctcctggcgtctaaatgagcgtcactatggggccttgatcggtctcaacagggagcaaatggctttgaatcatggtgaagaacaagtgaggctctggagaagaagctacaatataaccccgcctcccattgaggagtctcatccttactaccacgaaatctacaacgaccggaggtataaagtatgtgatgtgcccttggatcagctgccacggtctgaaagcttaaaggatgttctggaaagactccttccctattggaatgaaaggattgctcctgaagtcttacgtggcaaaaccgttctgatatctgctcatggaaatagcagtagggcactcctaaaacacctggaaggtatctcggatgaaaacctgggtgaccaagaggcgatccaagcagccattaagaaagtagaagatcaaggaaaagtgaaacaagctaaaaaatag

SEQ ID NO: 6365 - protein, 231 aa, Macaca fascicularis
MSKYKLIMLRHGEGAWNKENRFCSWVDQKLNSEGMEEARNCGKQLKALNFEFDLVFTSVLNRSIHTAWLILEELGQEWVPVESSWRLNERHYGALIGLNREQMALNHGEEQVRLWRRSYNITPPPIEESHPYYHEIYNDRRYKVCDVPLDQLPRSESLKDVLERLLPYWNERIAPEVLRGKTVLISAHGNSSRALLKHLEGISDENLGDQEAIQAAIKKVEDQGKVKQAKK

SEQ ID NO: 6366 - DNA, 780 bp, Macaca fascicularis
  CDS (1)..(780)
atgtccaagtacaaacttattatgttaagacatggtgagggtgcttggaataaggagaaccgtttttgtagctgggtggatcagaaactcaacagtgaaggcatggaggaagctcggaactgtgggaagcaactcaaagcattaaactttgagtttgatcttgtattcacatctgtccttaatcggtccattcacacagcctggctgatcctagaagagctagggcaggaatgggtgcccgtggaaagctcctggcgtctaaatgagcgtcactatggggccttgatcggtctcaacagggagcaaatggctttgaatcatggtgaagaacaagtgaggctctggagaagaagctacaatataaccccgcctcccattgaggagtctcatccttactaccacgaaatctacaacgaccggaggtataaagtatgtgatgtgcccttggatcagctgccacggtctgaaagcttaaaggatgttctggaaagactccttccctattggaatgaaaggatagctcctgaagtcttacgtggcaaaaccgttctgatatctgctcatggaaatagcagtagggcactcctaaaacacctggaaggtatctcagatgaagacatcatcaacattactcttcctactggagtccccattcttctggaactggatgaaaacctgcgtgctgttgggcctcatcagttcctgggtgaccaagaggcgatccaagcagccattaagaaagtagaagatcaaggaaaagtgaaacaagctaaaaaatag

SEQ ID NO: 6367 - protein, 259 aa, Macaca fascicularis
MSKYKLIMLRHGEGAWNKENRFCSWVDQKLNSEGMEEARNCGKQLKALNFEFDLVFTSVLNRSIHTAWLILEELGQEWVPVESSWRLNERHYGALIGLNREQMALNHGEEQVRLWRRSYNITPPPIEESHPYYHEIYNDRRYKVCDVPLDQLPRSESLKDVLERLLPYWNERIAPEVLRGKTVLISAHGNSSRALLKHLEGISDEDIINITLPTGVPILLELDENLRAVGPHQFLGDQEAIQAAIKKVEDQGKVKQAKK

SEQ ID NO: 6368 - DNA, 765 bp, Homo sapiens
  CDS (1)..(765)
atggccgcctacaaactggtgctgatccggcacggcgagagcgcatggaacctggagaaccgcttcagcggctggtacgacgccgacctgagcccggcgggccacgaggaggcgaagcgcggcgggcaggcgctacgagatgctggctatgagtttgacatctgcttcacctcagtgcagaagagagcgatccggaccctctggacagtgctagatgccattgatcagatgtggctgccagtggtgaggacttggcgcctcaatgagcggcactatgggggtctaaccggtctcaataaagcagaaactgctgcaaagcatggtgaggcccaggtgaggatctggaggcgctcctatgatgtcccaccacctccgatggagcccgaccatcctttctacagcaacatcagtaaggatcgcaggtatgcagacctcacagaagatcagctaccctcctgtgagagtctgaaggatactattgccagagctctgcccttctggaatgaagaaatagttccccagatcaaggaggggaaacgtgtactgattgcagcccatggcaacagcctccggggcattgtcaagcatctggagggtctctctgaagaggctatcatggagctgaacctgccgactggtattcccattgtctatgaattggacaagaacttgaagcctatcaagcccatgcagtttctgggggatgaagagacggtgcgcaaagccatggaagctgtggctgcccagggcaaggccaagaagtga

SEQ ID NO: 6369 - protein, 254 aa, Homo sapiens
MAAYKLVLIRHGESAWNLENRFSGWYDADLSPAGHEEAKRGGQALRDAGYEFDICFTSVQKRAIRTLWTVLDAIDQMWLPVVRTWRLNERHYGGLTGLNKAETAAKHGEAQVRIWRRSYDVPPPPMEPDHPFYSNISKDRRYADLTEDQLPSCESLKDTIARALPFWNEEIVPQIKEGKRVLIAAHGNSLRGIVKHLEGLSEEAIMELNLPTGIPIVYELDKNLKPIKPMQFLGDEETVRKAMEAVAAQGKAKK

SEQ ID NO: 6370 - DNA, 765 bp, Toxoptera citricida
  CDS (1)..(765)
atggccaagtacaaggtagtgatggttagacacggtgaaagcgaatggaaccaaaaaaacttgttctgtggatggtatgatgcttcgttaagccccaaaggtgaagaggaagcagcaaacgctggtaaagcattgaaacaaggcaattacaaatttgacctagcccacacatctgtattaaagagagcacaaaacactctgggtgcaatattgaaagaacttggccaagaagacattccgatatctaaaacttggcgtttgaatgaaagacattatggtggcctcactggattgaacaaatctgagactgcagccaaatatggcgaagaacaagttcaaatttggagacgtagtttcgacactcctccaccttccatggatacagaccatgcatactatgatcaaattgtaaatgaccctcgttacaaagatgaacctttaaaggaggaatttcctatgtttgaatcattgaaattgacaattcagaggacattgccttactggaatgatgttattattcctcagttaaaagaaggaaaacaaatattgatagctgctcatggaaacagtcttagaggaatagtcaaacatttagacaatttgacagaagaccaaatcatgtgtcttaacttacctactggtataccatttgaatatgaattagatgaaaactttaaacctgtagtttcaatgaagtttttgggtgacgaggagactgtaaaaaaggcaattgaagctgttgctgcacaaggcaaagcaaaataa

SEQ ID NO: 6371 - protein, 254 aa, Toxoptera citricida
MAKYKVVMVRHGESEWNQKNLFCGWYDASLSPKGEEEAANAGKALKQGNYKFDLAHTSVLKRAQNTLGAILKELGQEDIPISKTWRLNERHYGGLTGLNKSETAAKYGEEQVQIWRRSFDTPPPSMDTDHAYYDQIVNDPRYKDEPLKEEFPMFESLKLTIQRTLPYWNDVIIPQLKEGKQILIAAHGNSLRGIVKHLDNLTEDQIMCLNLPTGIPFEYELDENFKPVVSMKFLGDEETVKKAIEAVAAQGKAK

SEQ ID NO: 6372 - DNA, 762 bp, Xenopus laevis
  CDS (1)..(762)
atgcctcaccgcctagtcattgtacgccacggggaaagctcatggaatcaggagaacaggttctgtggctggtttgatgccgacctgagtgagaaagggacagaggaggcccgcagaggtgctcaggcaataaaggaggccgggatggagtttgacatctgctacacctcagtgctgaagagggcggtgcgtactctgtggtacatcatggatggaatagaccaaatgtggctgccagtggtcaggacctggagactgaatgagcgccactatgggggactgacgggcctcaacaaggcagagactgcggagaaacatggggaagagcaggtgaagatctggaggcgatcttatgacatcccaccaccagtcatgggagaagatcacccctactacaagctgataagtaaggatcggcgttacaaagatctcagcgccaaagagctgccctcctgtgagagtctgaaggacaccattgcccgtgccctacccttttggaacgatgtgattgccccccagatcctggctggaaagcgggtactgatcgcagcacatggaaacagcttgagaggcattgtcaagcacctggatgggatgtctgatgctgccatcatggaactcaatctccccactggaattcccattgtgtatgaacttgatgataacctgaagccaaccaaacccatgagctttcttggggacgaggaaactgtacggaaagctatggaggcagtggcagcccagggaaaggtcaaaaaatag

SEQ ID NO: 6373 - protein, 253 aa, Xenopus laevis
MPHRLVIVRHGESSWNQENRFCGWFDADLSEKGTEEARRGAQAIKEAGMEFDICYTSVLKRAVRTLWYIMDGIDQMWLPVVRTWRLNERHYGGLTGLNKAETAEKHGEEQVKIWRRSYDIPPPVMGEDHPYYKLISKDRRYKDLSAKELPSCESLKDTIARALPFWNDVIAPQILAGKRVLIAAHGNSLRGIVKHLDGMSDAAIMELNLPTGIPIVYELDDNLKPTKPMSFLGDEETVRKAMEAVAAQGKVKK

SEQ ID NO: 6374 - DNA, 816 bp, Oryza sativa
  CDS (1)..(816)
atggctgcggcaacatctcacagcgccattgtgcacacccaatctcaccggtggagacccaatcaggcagcaatttggttttggttttgtttgtgcatcgaggtcttcggtggtggagccggtgaaagttccctcatattgataaggcatggagaatcattgtggaatgagaaaaacctgttcactggctgcgtcgatgtgcccctgacacccaagggcgtcgaggaggctatcgaggcaggaaaacggatttgcagtatcccgatcgatgtgatatttacctcttcgctaattcgtgctcagatgactgcaatgcttgcgatgatgcagcatcggaggaagaaggtgtacagtgaagagacaaggaaacagtctattcctgtcataacagcttggcaactgaatgaacgaatgtatggtgagctgcaaggccttaataagcaggaaactgcagacaggtttggcaatgaacaagttcataaatggcgtcgtagttatgatattccacccccaaatggtgaaagtctagagatgtgtgcagagagagctgttgcttatttcaaggaacatgttgttcctcaactcacagctggaaagcatgtgatgattgctgcacatgggaattcactccgttcaattataatgcagcttgacaaattgacatctcaagaggtaatcagccttgagttgtcaacaggcattcctatgctttacattttcaaggaagggaagttcattagacggggaagcccagtaggaccttctgaggcaagcgtttgtgcctataccagggtaagagtcttctccaatttataa

SEQ ID NO: 6375 - protein, 271 aa, Oryza sativa
MAAATSHSAIVHTQSHRWRPNQAAIWFWFCLCIEVFGGGAGESSLILIRHGESLWNEKNLFTGCVDVPLTPKGVEEAIEAGKRICSIPIDVIFTSSLIRAQMTAMLAMMQHRRKKVYSEETRKQSIPVITAWQLNERMYGELQGLNKQETADRFGNEQVHKWRRSYDIPPPNGESLEMCAERAVAYFKEHVVPQLTAGKHVMIAAHGNSLRSIIMQLDKLTSQEVISLELSTGIPMLYIFKEGKFIRRGSPVGPSEASVCAYTRVRVFSNL

SEQ ID NO: 6376 - DNA, 765 bp, Xenopus laevis
  CDS (1)..(765)
atggccgcctacaaaattgtgcttatccgccacggagagagctcctggaaccaagagaatcgcttctgcggatggtttgacgcggaccttagtgaaactggccaacaagaagcccagagaggcggccaagctctcaaagatgctggctttgagtttgatatctgcttcacttctgtgcttaagcgggccattcgtacattatggatagctttggagggcattgatcagatgtggcttccagttgtgagaacatggcgtttgaatgagaggcattacggtggcttaacaggccttaataaggctgagactgccgctaagcatggagaagagcaggtcaagatttggagaagatcatttgacattccaccacctaccatggatccagatcatgattattatagcataatcagcaaggatcgacgctatgcagacctggcagaggaccagcttccaagctgtgaaagcctgaaggataccattgcacgagccctacccttctggaacgaggagattgtcccacttattaagcaagggaagcgagtgctcgttgcagctcatggcaacagtcttaggggaattgtcaagcacattgaaggtatgtcagatgaagatatcatgggactaaacttgcccactggcatcccgatcgtttatgaactagacaagaacctgaaacctactaagccaatgcagttcctgggagatgaagagactgtgaggaaggccatggaggctgtagctgcccaaggcaaagccaagaagtaa

SEQ ID NO: 6377 - protein, 254 aa, Xenopus laevis
MAAYKIVLIRHGESSWNQENRFCGWFDADLSETGQQEAQRGGQALKDAGFEFDICFTSVLKRAIRTLWIALEGIDQMWLPVVRTWRLNERHYGGLTGLNKAETAAKHGEEQVKIWRRSFDIPPPTMDPDHDYYSIISKDRRYADLAEDQLPSCESLKDTIARALPFWNEEIVPLIKQGKRVLVAAHGNSLRGIVKHIEGMSDEDIMGLNLPTGIPIVYELDKNLKPTKPMQFLGDEETVRKAMEAVAAQGKAKK

SEQ ID NO: 6378 - DNA, 765 bp, Homo sapiens
  CDS (1)..(765)
atggccgcctacaaactggtgctgatccggcacggcgagagcgcatggaacctggagaaccgcttcagcggctggtacgacgccgacctgagccaggcgggccacgaggaggcgaagcgcggcgggcaggcgctacgagatgctggctatgagtttgacatctgcttcacctcagtgcagaagagagcgatccggaccctctggacagtgctagatgccattgatcagatgtggctgccagtggtgaggacttggcgcctcaatgagcggcactatgggggtctaaccggtctcaataaagcagaaactgctgcaaagcatggtgaggcccaggtgaagatctggaggcgctcctatgatgtcccaccacctccgatggagcccgaccatcctttctacagcaacatcagtaaggatcgcaggtatgcagacctcacagaagatcagctaccctcctgtgagagtctgaaggatactattgccagagctctgcccttctggaatgaagaaatagttccccagatcaaggaggggaaacgtgtactgattgcagcccatggcaacagcctccggggcattgtcaagcatctggagggtctctctgaagaggctatcatggagctgaacctgccgactggtattcccattgtctatgaattggacaagaacttgaagcctatcaagcccatgcagtttctgggggatgaagagacggtgcgcaaagccatggaagctgtggctgcccagggcaaggccaagaagtga

SEQ ID NO: 6379 - protein, 254 aa, Homo sapiens [sequence omitted]

SEQ ID NO: 6380 - DNA, 780 bp, Xenopus laevis
  CDS (1)..(780)
atgtcaaaatataaacttgttatgttgaggcatggcgaaggtgcctggaacattgaaaaccgcttctgtagttgggttgaccaaaagttgagcgccgatgggctcaaagaagcagaggaatgtgggaaaaagctaaagtctttggggtttgagtttgatcttgtcttcacttccatcttgagtcgatcaatacaaacagcatggctggtactgagggagctagaccaagaatgggtccccacccagagttcatggcgactcaacgaacggcattacggagctttgataggtcttaaccgagcagaacttgctctgaatcatggagaagaacaagtcaaaatctggcggaggagctatgatgtctcccctccacccatagctgtgagccacccttattatcaagaaattcacaccgatcggaggtatacaacctgtgatattccaaaggaaattctaccaaagtctgaaagcttaaaacaagtactcgatcggcttctcccatattggaatgaagttattgcaccggagattaagaacggaaaaagggttcttatatcggcacatggcaacagcacaagggcacttctcaagcacttggaaggaatttctgactcggatattgtgaacatttctcttcctaccggcgttcctgtgctcctcgaacttgatgagaatctacatcccgtcaagcctcacgaattcttgggcgaccaagaggtcattcgagcagctataaagaaagtggaagatcaaggaaaagtgaagcctagtgataactga

SEQ ID NO: 6381 - protein, 259 aa, Xenopus laevis
MSKYKLVMLRHGEGAWNIENRFCSWVDQKLSADGLKEAEECGKKLKSLGFEFDLVFTSILSRSIQTAWLVLRELDQEWVPTQSSWRLNERHYGALIGLNRAELALNHGEEQVKIWRRSYDVSPPPIAVSHPYYQEIHTDRRYTTCDIPKEILPKSESLKQVLDRLLPYWNEVIAPEIKNGKRVLISAHGNSTRALLKHLEGISDSDIVNISLPTGVPVLLELDENLHPVKPHEFLGDQEVIRAAIKKVEDQGKVKPSDN

SEQ ID NO: 6382 - DNA, 780 bp, Xenopus laevis
  CDS (1)..(780)
atgtcaaaatataaacttgttatgctgagacacggcgaaggtgcctggaacattgaaaaccgcttctgcagttgggttgaccaaaagttgagccacgatgggctcagagaagccaaggagtgtgggaagaagttgaaatctttggggtttgagtttgaccttgtcttcacttccatcctgagtcgatccatacaaacagcatggctggtaatgcgggagctggaccaagaatgggtccccgtccagagttcatggcgactcaacgaacgtcattacggagctttgataggtcttaatcgagcagaacttgctctgaatcatggagaagaacaagtgaaaatctggcgaagaagctatgatgtctccccaccacccataaatgtgaatcacccttattatcaagaaattcacactgaccggaggtatacaacttgcgatattccaaaggaaaaactaccaaagtccgaaagcttaaaacaagtactcgaacgacttctcccatattggaacgaagtgatcgtaccggaaattaggaacggaaaacgtgttctgatatcggcacatggcaacagcacaagagcacttcttaagcacttggaaggaatctctgactcagatattgtgaacatttctcttcctaccggcgtccctgtgctccttgaactcgatgagaatctacatcccatcaagcctcacgaattcttgggcgaccaggaggccatccgagctgctataaagaaagtggaagatcaaggaaaagtgaaacctaatgataaataa

SEQ ID NO: 6383 - protein, 259 aa, Xenopus laevis
MSKYKLVMLRHGEGAWNIENRFCSWVDQKLSHDGLREAKECGKKLKSLGFEFDLVFTSILSRSIQTAWLVMRELDQEWVPVQSSWRLNERHYGALIGLNRAELALNHGEEQVKIWRRSYDVSPPPINVNHPYYQEIHTDRRYTTCDIPKEKLPKSESLKQVLERLLPYWNEVIVPEIRNGKRVLISAHGNSTRALLKHLEGISDSDIVNISLPTGVPVLLELDENLHPIKPHEFLGDQEAIRAAIKKVEDQGKVKPNDK

SEQ ID NO: 6384 - DNA, 765 bp, Xenopus laevis
  CDS (1)..(765)
atggccgcttacaaaattgtacttatccgccacggagagagctcttggaaccaagaaaatcgcttctgcggatggtttgatgcggatcttagcgaaaccggccagcaagaagcccagagaggcggccaagctctcaaagatgctggctttgagtttgatatctgcttcacgtctgtgcttaagcgggccattcgtacattatggatagctttggagggcatcgaccagatgtggctaccagttgtcagaacatggcgactgaatgagaggcattatggtggcctaacaggccttaataaggcggagactgctgctaagcatggagaagagcaggtcaaggtttggagaagatcatttgatattcctccacctccaatggatccagatcatgattattatagcataatcagcaaggatcgacgctacgcagacctgacagaggagcagcttccaagttgtgaaagcttgaaggataccattgcacgtgccctacccttctggaacgaggagattgtcccacttattaagcaggggaaacgagtgtttattgcagctcatggcaacagtcttaggggaattgtcaagcacattgaaggtatgtcagatgaagagatcatgggactaaacttgcccactggaatccctattgtttatgaactggacaagaacctgaaacctactaaaccaatgcagttcctgggagatgaagagactgtgcggaaggccatggaggctgtagctgcccaaggcaaagccaagaagtaa

SEQ ID NO: 6385 - protein, 254 aa, Xenopus laevis
MAAYKIVLIRHGESSWNQENRFCGWFDADLSETGQQEAQRGGQALKDAGFEFDICFTSVLKRAIRTLWIALEGIDQMWLPVVRTWRLNERHYGGLTGLNKAETAAKHGEEQVKVWRRSFDIPPPPMDPDHDYYSIISKDRRYADLTEEQLPSCESLKDTIARALPFWNEEIVPLIKQGKRVFIAAHGNSLRGIVKHIEGMSDEEIMGLNLPTGIPIVYELDKNLKPTKPMQFLGDEETVRKAMEAVAAQGKAKK

SEQ ID NO: 6386 - DNA, 597 bp, Mus musculus
  CDS (1)..(597)
atgtctgtgcagaagagagcaatccggaccctctggacagtcctggatgccattgaccagatgtggttgccagtggtcaggacttggcgcctcaatgagcgacactatggcggtctgacaggtctcaacaaagcagaaactgctgctaagcatggtgaggcccaggtaaagatctggagacgatcttatgatgtcccaccgcctcccatggagcctgatcaccccttctacagcaacatcagcaaggatcgcaggtacgcagaccttactgaagaccagctcccctcctgtgagagcctgaaggacactattgccagagcactgcccttctggaatgaagaaattgtcccccagatcaaagaggggaaaagggtcttgattgccgcccacggcaacagccttcggggcatcgttaagcatctggagggtctctcagaagaggccatcatggagctgaacctgcccacgggcatccctatcgtctatgaactggacaagaacttgaagcccatcaagcccatgcagttcctgggagacgaggagaccgtgcgcaaagccatggaagctgtggctgctcagggcaaggtgaagaagtga

SEQ ID NO: 6387 - protein, 198 aa, Mus musculus
MSVQKRAIRTLWTVLDAIDQMWLPVVRTWRLNERHYGGLTGLNKAETAAKHGEAQVKIWRRSYDVPPPPMEPDHPFYSNISKDRRYADLTEDQLPSCESLKDTIARALPFWNEEIVPQIKEGKRVLIAAHGNSLRGIVKHLEGLSEEAIMELNLPTGIPIVYELDKNLKPIKPMQFLGDEETVRKAMEAVAAQGKVKK

SEQ ID NO: 6388 - DNA, 765 bp, Homo sapiens
  CDS (1)..(765)
atggccgcctacaaactggtgctgatccggcacggcgagagcgcatggaacctggagaaccgcttcagcggctggtacgacgccgacctgagcccggcgggccacgaggaggcgaagcgcggcgggcaggcgctacgagatgctggctatgagtttgacatctgcttcacctcagtgcagaagagagcgatccggaccctctggacagtgctagatgccattgatcagatgtggctgctagtggtgaggacttggcgcctcaatgagcggcactatgggggtctaaccggtctcaataaagcagaaactgctgcaaagcatggtgaggcccaggtgaagatctggaggcgctcctatgatgtcccaccacctccgatggagcccgaccatcctttctacagcaacatcagtaaggatcgcaggtatgcagacctcacagaagatcagctaccctcctgtgagagtctgaaggatactattgccagagctctgcccttctggaatgaagaaatagttccccagatcaaggaggggaaacgtgtactgattgcagcccatggcaacagcctccggggcattgtcaagcatctggagggtctctctgaagaggctatcatggagctgaacctgccgactggtattcccattgtctatgaattggacaagaacttgaagcctatcaagcccatgcagtttctgggggatgaagagacggtgcgcaaagccatggaagctgtggctgcccagggcaaggccaagaagtga

SEQ ID NO: 6389 - protein, 254 aa, Homo sapiens [sequence omitted]

SEQ ID NO: 6390 - DNA, 765 bp, Apis cerana
  CDS (1)..(765)
atgtctaaatatacgattgtaatggtacgtcatggagaaagtgaatggaataaattgaatttattttgtggatggtatgattcccatttatctgataaaggtaagattgaagcagtttcagcaggaaaagcaatcaaagacgcaaaattcacttttgatattgctcatacatcattattatcaagagctcaagatactcttaaagcaattcttaaagaaataggacaagaaaacattactgttcaaaagacatggcgattaaatgaacgtcattatggaggtttgactggtttaaataaagctgaaactgctgctaaatatggtgaagaacaagttcaaatttggagaagatcttttgatacacctcctccacctatggaaccagatcataaatattatgaaataatagtaaaggatcctagatatgcaaatgatccaaaaccagaggaatttcctaaatttgagtctctcaaattaacaattgaaaggacattaccatattggaataatactattattcctcaattaaaagaaggaaaaagaattatcatagctgctcatggaaatagtttgcgtggcatagttaaacatttagatcaaatgagcaatgatgaaatcatgaaattaaatttaccaactggtattccatttgtttatgaattagatgaaaatttcaagcctgttgtatctatgaaattcttaggtgatgaagaaactgtaaaagctgcaatggctgcagttgctgcacaagcaaaagttaaataa

SEQ ID NO: 6391 - protein, 254 aa, Apis cerana
MSKYTIVMVRHGESEWNKLNLFCGWYDSHLSDKGKIEAVSAGKAIKDAKFTFDIAHTSLLSRAQDTLKAILKEIGQENITVQKTWRLNERHYGGLTGLNKAETAAKYGEEQVQIWRRSFDTPPPPMEPDHKYYEIIVKDPRYANDPKPEEFPKFESLKLTIERTLPYWNNTIIPQLKEGKRIIIAAHGNSLRGIVKHLDQMSNDEIMKLNLPTGIPFVYELDENFKPVVSMKFLGDEETVKAAMAAVAAQAKVK

SEQ ID NO: 6392 - DNA, 762 bp, Xenopus laevis
  CDS (1)..(762)
atgcctcaccgcctagtaatcgtacgccacggagaaagctcgtggaatcaggagaacaggttctgtggctggtttgatgccgacctgagtgagaaaggggcagaggaggcccgtagaggagctcaggcaataaaggaggccgggatggagtttgacatctgctacacctccgtgctgaagagagcggtgcgtactctgtggtacatcttggacggagtagaccaaatgtggctgccagtggtcaggacctggagactgaatgagcgccactatgggggactgacaggcctcaacaaggcagagactgcggagaaacatggggaagagcaggtgaagatatggagacgatcttatgacaccccaccaccagtcatgggagaagatcacccatactacaagctgataagtaaggatcggcgttacaaagatctcacctctacagagctgccctcctgtgagagtctgaaggacaccattgcccgtgccctacccttttggaatgaagtgattgccccccagatcctggctggaaagcgagtactgatcgcagcacatggaaacagcttgagaggcattgtaaagcacctggatgggatgtctgatgctgccatcatggaacttaatctacccactggaattcccattgtatatgaacttgatgataacctgaagccaaccaaacccatgagcttccttggggatgaggaaactgtacggaaagccatggaggcagtggcagcccagggaaaggccaaaaaatag

SEQ ID NO: 6393 - protein, 253 aa, Xenopus laevis
MPHRLVIVRHGESSWNQENRFCGWFDADLSEKGAEEARRGAQAIKEAGMEFDICYTSVLKRAVRTLWYILDGVDQMWLPVVRTWRLNERHYGGLTGLNKAETAEKHGEEQVKIWRRSYDTPPPVMGEDHPYYKLISKDRRYKDLTSTELPSCESLKDTIARALPFWNEVIAPQILAGKRVLIAAHGNSLRGIVKHLDGMSDAAIMELNLPTGIPIVYELDDNLKPTKPMSFLGDEETVRKAMEAVAAQGKAKK

SEQ ID NO: 6394 - DNA, 1005 bp, Arabidopsis thaliana
  CDS (1)..(1005)
atggctactgctacgtctcaccaatcagtcgtttcatttgcttctctccggtcttctccttcttctacaatctctcaatgtggattcaagatcgattcttcactgagctttacatcgaaaaagacaaacttttgcaagattaaagcaatggcatcatcagtttcttatgacaacactctcttgtctccttccaagacaatccctgacaattctcaaaagaaatcaaatgaagcagctttgatattgattaggcgtggagaatctttatggaacgagaagaatctttttactggttgtgttgatgtgccattgactgagaaaggtgttgaagaagctattgaagcagggaagaggattagtaacattcctgttgatgttatctttacatcttctttgattcgtgctcagatgactgcaatgcttgctatgattcaacaccgtcgtaagaaggtaccgatcatcttgcacgatgaaagcgaacaggcgaaaacttggagtcaagtttttagtgatgagactaaaaaccaatccattcctgtcatacctgcttggcagctcaatgaaagaatgtatggagaattacaaggtcttaacaagcaagaaacagccgagagatatgggaaagagcaagttcacgaatggcgtaggagttatgatattcctcctcccaaaggagagagtttggagatgtgtgctgagagagcagtagcttattttcaggacaatatcgaaccgaagcttgcagctggaaagaacgtaatgatagctgctcacgggaactcgctgcggtctatcattatgtatcttgacaaattgacttgccaggaggtgataagtctagagctatcgacaggtatacctcttctctacatattcaaagaaggcaaattcatgaagcggggaagcccggttggtccaacagaagctggtgtttatgcttataccaagagattggctcaatacagacagaagctagaggacgatagtgaagtactctgtgcctga

SEQ ID NO: 6395 - protein, 334 aa, Arabidopsis thaliana
MATATSHQSVVSFASLRSSPSSTISQCGFKIDSSLSFTSKKTNFCKIKAMASSVSYDNTLLSPSKTIPDNSQKKSNEAALILIRRGESLWNEKNLFTGCVDVPLTEKGVEEAIEAGKRISNIPVDVIFTSSLIRAQMTAMLAMIQHRRKKVPIILHDESEQAKTWSQVFSDETKNQSIPVIPAWQLNERMYGELQGLNKQETAERYGKEQVHEWRRSYDIPPPKGESLEMCAERAVAYFQDNIEPKLAAGKNVMIAAHGNSLRSIIMYLDKLTCQEVISLELSTGIPLLYIFKEGKFMKRGSPVGPTEAGVYAYTKRLAQYRQKLEDDSEVLCA

SEQ ID NO: 6396 - DNA, 1005 bp, Arabidopsis thaliana
  CDS (1)..(1005)
atggctactgctacgtctcaccaatcagtcgtttcatttgcttctctccggtcttctccttcttctacaatctctcaatgtggattcaagatcgattcttcactgagctttacatcgaaaaagacaaacttttgcaagattaaagcaatggcatcatcagtttcttttaacaacactctcttgtctccttccaagacaatccctgacaattctcaaaagaaatcaaatgaagcagctttgatattgattaggcatggagaatctttatggaacgagaagaatctttttactggttgtgttgatgtgccattgactgagaaaggtgttgaagaggctattgaagcagggaagaggattagtaacattcctgttgatgttatctttacatcttctttgattcgtgctcagatgactgcaatgcttgctatgattcaacaccgtcgtaagaaggtaccgatcatcttgcacgatgaaagcgaacaggcgaaaacttggagtcaagtttttagtgatgagactaaaaaccaatccattcctgtcatacctgcttggcagctcaatgaaagaatgtatggagaattacaaggtcttaacaagcaagaaacagccgagagatatgggaaagagcaagttcacgaatggcgtaggagttatgatattcctcctcccaaaggagagagtttggagatgtgtgctgagagagcagtagcttattttcaggacaatatcgaaccgaagcttgcagctggaaagaacgtaatgatagctgctcacgggaactcgctgcggtctatcattatgtatcttgacaaattgacttgccaggaggtgataagtctagagctatcgacaggtatacctcttctctacatattcaaagaaggcaaattcatgaagcggggaagcccggttggtccaacagaagctggtgtttatgcttataccaagagattggctcaatacagacagaagctagaggacgatagtgaagtactctgtgcctga

SEQ ID NO: 6397 - protein, 334 aa, Arabidopsis thaliana
MATATSHQSVVSFASLRSSPSSTISQCGFKIDSSLSFTSKKTNFCKIKAMASSVSFNNTLLSPSKTIPDNSQKKSNEAALILIRHGESLWNEKNLFTGCVDVPLTEKGVEEAIEAGKRISNIPVDVIFTSSLIRAQMTAMLAMIQHRRKKVPIILHDESEQAKTWSQVFSDETKNQSIPVIPAWQLNERMYGELQGLNKQETAERYGKEQVHEWRRSYDIPPPKGESLEMCAERAVAYFQDNIEPKLAAGKNVMIAAHGNSLRSIIMYLDKLTCQEVISLELSTGIPLLYIFKEGKFMKRGSPVGPTEAGVYAYTKRLAQYRQKLEDDSEVLCA

SEQ ID NO: 6398 - DNA, 933 bp, Drosophila melanogaster
  CDS (1)..(933)
atgaatgaacacgatatagactgcaaacactttccaaattcaaagtgtcccaaaatgttggctctggccaggaattcgtggtgtggccaattgctgtgtcgcgtggcgaacatcgaagcccgctgcccgttctcgaagtcatcatccggcggaaagcaggccgagaagaagggcaagtacaggattgtgatggttcgtcatggagagtccgaatggaatcagaagaacctattctgcggatggttcgatgccaagctatcggagaaggggcagcaggaggcctgtgccgctggcaaagcgctcaaagatgccaaaattgagttcgatgtggcccacacctcggtgctgaccagagcccaggagacactcagggccgccctaaagtccagcgagcacaagaagattccggtgtgcaccacgtggcgcctcaacgagcgccactacggcggactgacgggactgaataaggccgagaccgccaagaagttcggcgaggagaaggttaagatctggcgccgcagctttgacaccccaccgccgccaatggagaaggatcacgagtactacgcctgcattgttgaggatccgcgctacaaggaccaactgaagccggaggagttccccaaatccgagtccctcaagctcaccatcgagcgcaccttgccctactggaacgaggtcatagtgccccagatcaaggatggaatgcgtgtcctgatcgccgcccacggcaacagcctgcggggcgtggtcaagcacttggaatgcatctctgacaaggacattatgagcctcaacctgcccactggcattcctttcgtctacgaactagacgagagcctcaagcctttggccacgttgaagttcctcggcgatccggagacggtgaagaaggcaatggagtcggtggccaaccagggcaaagccaagtga

SEQ ID NO: 6399 - protein, 310 aa, Drosophila melanogaster
MNEHDIDCKHFPNSKCPKMLALARNSWCGQLLCRVANIEARCPFSKSSSGGKQAEKKGKYRIVMVRHGESEWNQKNLFCGWFDAKLSEKGQQEACAAGKALKDAKIEFDVAHTSVLTRAQETLRAALKSSEHKKIPVCTTWRLNERHYGGLTGLNKAETAKKFGEEKVKIWRRSFDTPPPPMEKDHEYYACIVEDPRYKDQLKPEEFPKSESLKLTIERTLPYWNEVIVPQIKDGMRVLIAAHGNSLRGVVKHLECISDKDIMSLNLPTGIPFVYELDESLKPLATLKFLGDPETVKKAMESVANQGKAK

SEQ ID NO: 6400 - DNA, 753 bp, Schistosoma japonicum
  CDS (1)..(753)
atggctccctacaaaattgtattcattcgtcatggggagagtgtttacaatgaagaaaatagattctgtggttggcatgatgcagacctttcagcgcaaggtgtcaccgaagctgaacaagctggtcaattactccaccaaaatcagttcacatttgacactgcctatacaagtgttctaaaaagagctattaaaacgttaaactttgttttagacaaactcgatcttaactggatacctgtaacgaaaacgtggcgtctaaatgaaagaatgtacggtgctctccagggacttaataagtctgaaactgctgctaaacatggtgagcaacaagttaagatatggagacgtgcatatgatatacctcctcctcctgttgatatttcggaccctcgcttccctggtaatgaagctaagtatgctttacttgactcttcttgcataccacgtactgaatgcttaaaggacactgtacaacgtgtactaccattctgggttgatactatttctgctgatattaagagctgcaaacgtgttcttattggcgctcacggtaacagtttacgagcgctcattaagtacttggataatacatctgattcggatatagtggagcttaatatacctactggtattccactcgtttatgaactagatgcaaacctaaggccaatcaaacactattatcttgcagatgaagcaacagttgcagctgctatagatcgtgtagcgaatcaaggaaagaagaaataa

SEQ ID NO: 6401 - protein, 250 aa, Schistosoma japonicum
MAPYKIVFIRHGESVYNEENRFCGWHDADLSAQGVTEAEQAGQLLHQNQFTFDTAYTSVLKRAIKTLNFVLDKLDLNWIPVTKTWRLNERMYGALQGLNKSETAAKHGEQQVKIWRRAYDIPPPPVDISDPRFPGNEAKYALLDSSCIPRTECLKDTVQRVLPFWVDTISADIKSCKRVLIGAHGNSLRALIKYLDNTSDSDIVELNIPTGIPLVYELDANLRPIKHYYLADEATVAAAIDRVANQGKKK

SEQ ID NO: 6402 - DNA, 2034 bp, Arabidopsis thaliana
  CDS (1)..(2034)
atgattccactctcgtttgcagcattaggagacatagttgataagaagcttgatgaggattatgtaaaggaagaagttgaaatgatgatacaagtatctctgctatccacacaagcagcaccgggagaacgaccaacgatgtcggaagttgaaatttttagaaactcctgcttgtgctacataaactggttttgcaacatcatctccataatatattctaacagtttgcttttgaggattgattcaggatcatcatctatatctgttgtcttcttagtttttactctgtctcggatggagcaacgacggatgttaacggcggctagaccacgtttgtcctcgacgatccgtacgattacgtctcacgtggcgttctcagcaagccgtctcttgaaaccttatgttgcatatcggcttggattggaggacgcgaatcagaggaaaacagagaacgaatccaccggtggagataaagaaatcgccaattcgctcctccactgtcttaaatttcactatcttcttcttcattttccttccttctcacttcaaatccataatcgctctacttctctctctctctctagattcgaaaaaatggcgaaactggtgatgttgttggttctctgtatcttaccggcgatagccatggcggcaaggaggggaaatattggaaagaatacaatggtggttcaaggtagcacctactgtgacatttgcaaattcggcttcgagactcctgaatcctcctacttcatccccggtgcaacggtgaagctatcatgcaaagacaggaagacaatggaagaggtttacacagacaaagctgtatcagacaaagaaggaaagtataagttcattgtccacgacgatcacagagaccagatgtgcgatgttttgcttgtgaaaagctcggataaaacctgctctaaaatctccgttggacgtgagaagtctcgtgtgatcttgaaccattacagtggcattgcctcgcagatcagacatgctaacaacatgggatttgagaaagaagtgagaatggctacttctacgactatgtctcatcaagcgattgggtctgttgtctctcaaagaccattcaaagcttctcagtttctaaaggagcctttgaataatgtaccaatgaaattcagacaaaaaagattcaagattgaagcaactgcttctcagatatctgtcgttgacaacactttcttgtctccgtctccttccaagaacaaaccacatgaatctaagaagaaatcaaatgaagcagctttgatattgattaggcatggagaatcgttatggaatgagaagaatttgttcacgggttgtgttgatgtgccattgactcagaaaggtgttggagaagctattgaagctgggaagaagattagtaacattcctgtagatttgattttcacttcttctttaatccgtgctcagatgactgcaatgcttgccatgactcagcatcgtcgcaagaaggttccaatcatcttgcacaacgagagtgtaaaggcgaaaacttggagtcatgttttcagcgaagaaactagaaaacaatctatcccggttatagcggcttggcaactgaatgagagaatgtatggagagttgcagggtttgaacaagaaagaaacagcggaaagatacgggacacaacaagttcacgaatggcgcaggagttacgaaattcctcctccgaaaggcgagagcttggagatgtgtgctgagagagcagtggcttattttgaagacaatatcaaaccagagcttgcatctggaaacaatgtaatgattgctgctcacgggaactcattgagatctatcattatgtatcttgacgatttaacttctcaggaggttacaactctagacctgtccacaggtgtaccattgctctacatcttcaaagaaggcaagttcatgaaacgaggaagccccgtcggttctactgaagctggtgtctatgcttatacaaagagattggcacaatacagagagaagcttgatgcggcggcgaccatttaa

SEQ ID NO: 6403 - protein, 677 aa, Arabidopsis thaliana
MIPLSFAALGDIVDKKLDEDYVKEEVEMMIQVSLLSTQAAPGERPTMSEVEIFRNSCLCYINWFCNIISIIYSNSLLLRIDSGSSSISVVFLVFTLSRMEQRRMLTAARPRLSSTIRTITSHVAFSASRLLKPYVAYRLGLEDANQRKTENESTGGDKEIANSLLHCLKFHYLLLHFPSFSLQIHNRSTSLSLSRFEKMAKLVMLLVLCILPAIAMAARRGNIGKNTMVVQGSTYCDICKFGFETPESSYFIPGATVKLSCKDRKTMEEVYTDKAVSDKEGKYKFIVHDDHRDQMCDVLLVKSSDKTCSKISVGREKSRVILNHYSGIASQIRHANNMGFEKEVRMATSTTMSHQAIGSVVSQRPFKASQFLKEPLNNVPMKFRQKRFKIEATASQISVVDNTFLSPSPSKNKPHESKKKSNEAALILIRHGESLWNEKNLFTGCVDVPLTQKGVGEAIEAGKKISNIPVDLIFTSSLIRAQMTAMLAMTQHRRKKVPIILHNESVKAKTWSHVFSEETRKQSIPVIAAWQLNERMYGELQGLNKKETAERYGTQQVHEWRRSYEIPPPKGESLEMCAERAVAYFEDNIKPELASGNNVMIAAHGNSLRSIIMYLDDLTSQEVTTLDLSTGVPLLYIFKEGKFMKRGSPVGSTEAGVYAYTKRLAQYREKLDAAATI

SEQ ID NO: 6404 - DNA, 738 bp, Bacillus cereus
  CDS (1)..(738): transl_table=11
atgataaaacttgtacttattcgtcacggacagagtttatggaatcttgaaaatcgttttactggttggactgatgtagacttatcagagaatggattaagtgaagcgagagaagcaggagcaatattaaagaaaaatggatatacttttgatgttgcttatacatctgtattaaaacgagcaattcggacgttatggattgtacttcatgagatggaccttgcatggatcccagtacataaatgttggaaactaaatgaaagacattacggtgcattgcaaggattgaataaagatgaaacggcgaaaaaatatggtgaggagcaagttcatatttggagaagaagtattgatgtaagaccacctgctcttactgaagatgatcctaggtatgaaatgaatgatccaagatataaagcacttaaaaaaggtgagcttccattgactgaatgtttagtggatacggagaaaagagtacttgcttattggcattcagaaatcgcgccatcattaaaaagtggtgaaaaggtaattatttcatcacacggtaatacgattcgttcgctagtgaaatacttagataacctttcaagtgatggtgttgtttcattaaatattccaacgagtataccactcgtttatgaattagacgataatttacgaccaattcgtcattattacttaagtatggacggagaagtaccagaaggggaaattccgaaacatatttctttttaa

SEQ ID NO: 6405 - protein, 245 aa, Bacillus cereus
MIKLVLIRHGQSLWNLENRFTGWTDVDLSENGLSEAREAGAILKKNGYTFDVAYTSVLKRAIRTLWIVLHEMDLAWIPVHKCWKLNERHYGALQGLNKDETAKKYGEEQVHIWRRSIDVRPPALTEDDPRYEMNDPRYKALKKGELPLTECLVDTEKRVLAYWHSEIAPSLKSGEKVIISSHGNTIRSLVKYLDNLSSDGVVSLNIPTSIPLVYELDDNLRPIRHYYLSMDGEVPEGEIPKHISF

SEQ ID NO: 6406 - DNA, 750 bp, Bacteroides thetaiotaomicron
  CDS (1)..(750): transl_table=11
atgaaaagaatagtgttattacgtcatggcgaaagtctatggaacaaagaaaaccgttttactggatggacggacgtggatttaagcgagaaaggagttgaagaagcctgcaaggcaggcgatgcattacgggaggctggattttcttttgaggcagcttacacttcttacttgaaacgtgccgtaaaaacgttgaactgtgtcttggaccggctggataaagactggattccggttgaaaagacctggcggctgaacgagaagcattacggtatgcttcagggactgaataagagtgaaacagcggtccaatatggtgaagaacaagtacacatctggcgaagaagctatgacgtggctcccgctccggtaggcaaagatgatccccgtaatccgggcatggatatccgctatgccggtgtaccagatagcgaacttccccgtacggaatccctgaaagatactattgggcgtgtcatgccttactggaaatgcatcatctttcccgcattgatgtataaggacagcctgctggtagtcgcccatggtaacagcctgcgcggaatcatcaagcatctcaaaggaatttccgatacggatatttccaacctgaacctgcctacggcagttccttatgtctttgaatttgacgacaggctggttcttgtcaaggactactaccttggaaacccggaagagatacggaaacgggcagaagctgtggccaaacaagggatggctaaaaaataa

SEQ ID NO: 6407 - protein, 249 aa, Bacteroides thetaiotaomicron
MKRIVLLRHGESLWNKENRFTGWTDVDLSEKGVEEACKAGDALREAGFSFEAAYTSYLKRAVKTLNCVLDRLDKDWIPVEKTWRLNEKHYGMLQGLNKSETAVQYGEEQVHIWRRSYDVAPAPVGKDDPRNPGMDIRYAGVPDSELPRTESLKDTIGRVMPYWKCIIFPALMYKDSLLVVAHGNSLRGIIKHLKGISDTDISNLNLPTAVPYVFEFDDRLVLVKDYYLGNPEEIRKRAEAVAKQGMAKK

SEQ ID NO: 6408 - DNA, 699 bp, Gloeobacter violaceus
  CDS (1)..(699): transl_table=11
atggctcacctcatccttatccggcacggccagagtctttggaacgccgccaacaaatttaccggttgggtggacgttcccttgagtgagcgcggccgggcggaggcgacgatcgcttcttgcaaacttcgggattatcgggtgaacgtctgcttcaccagcatgctgatgcgcgccatcgaaacagcggtgattaccctgaccgagtgcgacgatatctgcggcggcaaaatcccaatcatcaaacacgaagccgacgacgagaactggcacggctgggacaactacgacggcgacccggcggcggagttgcccatctatcccaccgcgaccctggacgagcgctactacggcgatctgcaaggcctcgacaaagccgagacgaccgcgaagtacggcaaggagcaagtccagatctggcggcgctcctactcggtgcgcccccccggcggcgagagcctggaggacacgcgcaagcgcgtctacccctatttcaccaaccgtatcctgggccatatcaagcagggggacaacgtgctggtggctgcccacggcaactccctgcgctcgatcatcatgattcttgaaaccctcagcgaggaagaagtgcccaaggtggagctggccaccggggtgccgatcgtctacgaactcgacaaagcggcccacatgctcagcaaggccgtgctcaccaactga

SEQ ID NO: 6409 - protein, 232 aa, Gloeobacter violaceus
MAHLILIRHGQSLWNAANKFTGWVDVPLSERGRAEATIASCKLRDYRVNVCFTSMLMRAIETAVITLTECDDICGGKIPIIKHEADDENWHGWDNYDGDPAAELPIYPTATLDERYYGDLQGLDKAETTAKYGKEQVQIWRRSYSVRPPGGESLEDTRKRVYPYFTNRILGHIKQGDNVLVAAHGNSLRSIIMILETLSEEEVPKVELATGVPIVYELDKAAHMLSKAVLTN

SEQ ID NO: 6410 - DNA, 693 bp, Lactobacillus johnsonii
  CDS (1)..(693): transl_table=11
atgtcgaaattagttttaattcgtcacggtcaaagtgaatggaacctttctaaccaatttactggttgggttgatgtaaacctttcagaaaaaggtgttgaagaagctaagaaggctggtcgtttaattaaggaacacggtcttgaatttgatcaagcttacacttcattattaactcgtgctatcaagactttgcactacgcacttgaagaaagtgaccaactttggattcctgaaactaagacttggagattaaacgaacgtcattacggtgctcttcaaggtttaaacaagaaggatactgctgaaaagtacggtgacgaacaagttcacatttggcgtcgttcatacgatgttttgccaccagctattgatgacgataacgaatacagtcaagcacatgaccgtcgttacgcaaatcttgatccacatatcgttcctaaggcagaaaacttacacgttactttagatcgtgtaatgccattctgggaagatcacattgctccagatttacttgacggcaagaacgttattattgctgcacacggtaactcacttcgtgctttaactaagtacattgaaaacatctctgatgatgacatcatggacttagaaatgaagactggtgaaccagttgtttacacatttgacgacaagttagatgttgttaacaaagaaaagcttgacgactaa

SEQ ID NO: 6411 - protein, 230 aa, Lactobacillus johnsonii
MSKLVLIRHGQSEWNLSNQFTGWVDVNLSEKGVEEAKKAGRLIKEHGLEFDQAYTSLLTRAIKTLHYALEESDQLWIPETKTWRLNERHYGALQGLNKKDTAEKYGDEQVHIWRRSYDVLPPAIDDDNEYSQAHDRRYANLDPHIVPKAENLHVTLDRVMPFWEDHIAPDLLDGKNVIIAAHGNSLRALTKYIENISDDDIMDLEMKTGEPVVYTFDDKLDVVNKEKLDD

SEQ ID NO: 6412 - DNA, 678 bp, Lactobacillus plantarum
  CDS (1)..(678): transl_table=11
atgacagaactagtattggttcgccatggtgagagtacggccaatcgggataatacgtataccggttggagtgacgtcccgctaacagcagtgggtattgcacaggctcatcaagctggcaagcgattacgagctacgggactgcagtttggcgctgtacatacctcagtcctaaaacgggctatcgttaccgcgaatattatgttaagtgaaattgatcagttatggctgcctgagtataagacgtggcggttaaatgaacgacattacggtgccttacgtggtcaaaataaggatgtgactcgtcaagagtacggtaaggcgcaagttcaacagtggcggcggagcttttatacggtgccgccgttgttgacaccagctgaactagaccatgatcgacgttacaccaagtacggtgccgccgtcgaaccgcggggagaaagcttgaagatggcttacgaccgcatcatgccttattggatcgatgagattgcaccgcggttgttagacggccaaaaccaactcgtggtggcgcatggtagtacgttgcgtgcgatgatcaaatatttagagcatattagtgatactgggattgatggtgtcgaagttgctaacggagtgccaatttgttatcaccttgatcggcaactgcacgttatcggtaaagaagagtattaa

SEQ ID NO: 6413 - protein, 225 aa, Lactobacillus plantarum
MTELVLVRHGESTANRDNTYTGWSDVPLTAVGIAQAHQAGKRLRATGLQFGAVHTSVLKRAIVTANIMLSEIDQLWLPEYKTWRLNERHYGALRGQNKDVTRQEYGKAQVQQWRRSFYTVPPLLTPAELDHDRRYTKYGAAVEPRGESLKMAYDRIMPYWIDEIAPRLLDGQNQLVVAHGSTLRAMIKYLEHISDTGIDGVEVANGVPICYHLDRQLHVIGKEEY

SEQ ID NO: 6414 - DNA, 705 bp, Nitrosomonas europaea
  CDS (1)..(705): transl_table=11
gtgaacgaaatacaggaaccaatccggctggtattacttcgccatgggcaaagtatctggaatcaggacaggcattttacgggctggggtgatatcgtacttagcccgcagggtgaacaggaagccctgagagcgggccatctgctcaagcaggcaggttttacttttgatgcctgcttttgttcagaattgcagcgtgccagcgatacactcgctatagtgcagtcagtcatgggtttgaatcatctctcgacataccggacctggcgactgaatgaacgtcattatggtgcattggaggggatgcgcccctgggctgctatccggaaattcggtatctggtcgacaatgaaaagccagatccgttttgatgcagcgcctccactgctgatgccggatgacccgcgtgcaccggtaaatcagccacgttatgcggcagtcgatcgcactcaacttcccttggcagaaagtatgcagcagacattggagcgagtgcggccgctatggcaggaaaccattcttcctgaaataaggcaggggaaacgtttgctgatcgtctcgcaccagaatcttttaaaaacgctggttatgcagcttgaagggctgacaggcgcacagatcatgcgcctgtcgattactactggccatccgctttgttatgagctcgatcactcacttgtaccggtgaagcgctactacttgtga

SEQ ID NO: 6415 - protein, 234 aa, Nitrosomonas europaea
MNEIQEPIRLVLLRHGQSIWNQDRHFTGWGDIVLSPQGEQEALRAGHLLKQAGFTFDACFCSELQRASDTLAIVQSVMGLNHLSTYRTWRLNERHYGALEGMRPWAAIRKFGIWSTMKSQIRFDAAPPLLMPDDPRAPVNQPRYAAVDRTQLPLAESMQQTLERVRPLWQETILPEIRQGKRLLIVSHQNLLKTLVMQLEGLTGAQIMRLSITTGHPLCYELDHSLVPVKRYYL

SEQ ID NO: 6416 - DNA, 723 bp, Bacillus cereus
  CDS (1)..(723): transl_table=11
atggtaaagttagttttaatacgacatggacaaagtgaatggaatgttgaaaatcggtttacaggttggacggatgttgatttatctagtaaaggtttggaagaagcaagagaagccggagtaatgctgaaagctagtggtttctcatttgatatcgcatatacatctgttttgagaagagcgatgcgtactttatggattactctcgaagaaatggatttgatgtggatacctgtttataaaacatggaaattaaatgagcgacattacggtgcacttcaagggttaaataaggaagagacagcaagaaaatatggcgatgaacaagtaaccttatggagacgttcaacaaatgtacgcccaccagcactgacaaaagatgatgaaagatatgaagcagcacatccgaaatatagagatataaaagattatgagttccctcttacagaagacctagaagatacagagaaacgagttgtttcatattggaatgaagagatagctcctaacgtaaaagctggtaaacaagtaattattgcagcccatggaaatacaatacgtgctttagtaaaacatttagatcaaatttcagataaagatatagaaaatgtaaacattccaacaggaacaccattagtttatgaattggataacgatttaaaaccgataggccattattatttaaatagggaaatagaaactttagaagaaaaacaggtgtga

SEQ ID NO: 6417 - protein, 240 aa, Bacillus cereus
MVKLVLIRHGQSEWNVENRFTGWTDVDLSSKGLEEAREAGVMLKASGFSFDIAYTSVLRRAMRTLWITLEEMDLMWIPVYKTWKLNERHYGALQGLNKEETARKYGDEQVTLWRRSTNVRPPALTKDDERYEAAHPKYRDIKDYEFPLTEDLEDTEKRVVSYWNEEIAPNVKAGKQVIIAAHGNTIRALVKHLDQISDKDIENVNIPTGTPLVYELDNDLKPIGHYYLNREIETLEEKQV

SEQ ID NO: 6418 - DNA, 747 bp, Bacteroides thetaiotaomicron
  CDS (1)..(747): transl_table=11
atgaaaaagatagtattacttcgtcatggagagagtgcttggaacaaagaaaaccgtttcacaggttggacggatgtagacctgacggaaaagggagttgccgaagcggaaaaggcaggcgtcacgttgagggaatatggcttcaactttgataaagcctatacttcttatctgaaaagggcagtcaaaaccttgaactgcgtgcttgataaaatgaatctggactggattcccgtcgagaagagctggcgtctgaatgagaagcattacggcgatttgcaaggactcaataaggcggaaacagccgagaaatacggagaagaacaagtgctgatctggcgtcgcagttatgatatagctcccaatccgctttccgaaagcgatttgagaaatccgcgtttcgattatcgctatcacgaagtatccgatgcggaactgccgcgtaccgaatcattaaaagataccatcgaccgtattatgccgtactgggagtcggatatattcccggctttaaaagatgcgcataccttgctggttgtcgcgcatggcaatagtctgcgaggtatcattaagcatttgaaacatatttctgatgaagatatcatcaaactgaatcttcctactgccgttccttatgtattcgagttcgacgagaacctgaatgttgccaatgattacttcctgggcaatccggaagaaattcgtaagctgatggaagcggtagccaatcaggggaagaaaaaatag

SEQ ID NO: 6419 - protein, 248 aa, Bacteroides thetaiotaomicron
MKKIVLLRHGESAWNKENRFTGWTDVDLTEKGVAEAEKAGVTLREYGFNFDKAYTSYLKRAVKTLNCVLDKMNLDWIPVEKSWRLNEKHYGDLQGLNKAETAEKYGEEQVLIWRRSYDIAPNPLSESDLRNPRFDYRYHEVSDAELPRTESLKDTIDRIMPYWESDIFPALKDAHTLLVVAHGNSLRGIIKHLKHISDEDIIKLNLPTAVPYVFEFDENLNVANDYFLGNPEEIRKLMEAVANQGKKK

SEQ ID NO: 6420 - DNA, 660 bp, Gloeobacter violaceus
  CDS (1)..(660): transl_table=11
atggcactactggtcatggtccgccacggtcaatcgatctggaacctcgaaaaccgcttcaccggctggactgacgttcccctgaccgaaaaaggccgcgcggaagcccgcgcctgcggcgagttgatttattgcgtccccttcgccgtcgcctttacttccaaactgacgcgcgcccaagacaccttgcgcctcattctcgaagccgccgaccaaccggacgtgccggtgatcgaggatcaggccctcaatgagcgccactacggcgagctgcaggggctcaacaaagccgaaactgccgcgaagtacggtgaggaaacggtccggcagtggcggcgcagcctggaggggcgtccccccggcggcgagagcctcaaggacaccgccctgcgatcattgcgctatttctacgaaaaaattgttcccgagttggaggcgggtaagaacgtgctcgtcagtgcccacggcaacacgatccgggccattttgatggaactcgatcacctgagccccgagcaggtcgaaaaggtcgaaatcgaatactgcgtgccggtcgccttcgagcatcaggcggacggcaccttctcgcaggtgctcatgccccgatgcgacatcatccggccgccgcagccgccggcccgcagcatcgcccggctctag

SEQ ID NO: 6421 - protein, 219 aa, Gloeobacter violaceus
MALLVMVRHGQSIWNLENRFTGWTDVPLTEKGRAEARACGELIYCVPFAVAFTSKLTRAQDTLRLILEAADQPDVPVIEDQALNERHYGELQGLNKAETAAKYGEETVRQWRRSLEGRPPGGESLKDTALRSLRYFYEKIVPELEAGKNVLVSAHGNTIRAILMELDHLSPEQVEKVEIEYCVPVAFEHQADGTFSQVLMPRCDIIRPPQPPARSIARL

SEQ ID NO: 6422 - DNA, 690 bp, Lactobacillus johnsonii
  CDS (1)..(690): transl_table=11
gtgaaaagaaagttggccaaattagttttggttagacatggtgaaagtgtagctaatcgtgacaatgtttatacgggctggaatgatgtacctttaagtaaaaaagggattgcgcaggcaaaaaatgcaggccttaaggtagaaaaaatagctgaatttgcaccaacgcatatccatacttctgtcttatcgcgtgcaattatgacggctaatattattgcagatgtgtgcagctttttatatttaccgatcactaagacttggcgtttaaacgagcgtcactatggagcacttcgcggtattaataaggatgtttcaaagaaaatttttggtactaatcaagtcttagaatggagacgtggttttgatagtgtgcctcctttattaacgcagcccgtccaagatcgtagatatcaaaagtatgatatgcgtttaatgcctcagggagaaagtttacatcaaactcaagaaagactaatgccttatttttgggatcatattgcacctgaattaatggcaggtcatgatcaattggttgtagcccatggctcaagtttacgtgccttgattaaaaaaattgaagatatcagtaatgaggatattgtaaaagtagaagtgcccaatgcggagccaattgtttatacttttgatactgatttgcatattgtaaagaaagaaattctacattga

SEQ ID NO: 6423 - protein, 229 aa, Lactobacillus johnsonii
MKRKLAKLVLVRHGESVANRDNVYTGWNDVPLSKKGIAQAKNAGLKVEKIAEFAPTHIHTSVLSRAIMTANIIADVCSFLYLPITKTWRLNERHYGALRGINKDVSKKIFGTNQVLEWRRGFDSVPPLLTQPVQDRRYQKYDMRLMPQGESLHQTQERLMPYFWDHIAPELMAGHDQLVVAHGSSLRALIKKIEDISNEDIVKVEVPNAEPIVYTFDTDLHIVKKEILH

SEQ ID NO: 6424 - DNA, 693 bp, Lactobacillus plantarum
  CDS (1)..(693): transl_table=11
atggcaaaattagtattgattcgtcacggtcaaagtgaatggaacttatctaaccaatttactggttgggttgacgttgatttaagcgaaaagggtgttgaagaagctaaggctgctggtcaaaaagttaaagaagcaggcttagaattcgattacgcctttacttcagttttgactcgtgccatcaagactttgcactatgtgcttgaagaatccgaccaactctggattccagaaaccaagacttggcgtttaaacgaacgtcattatggtgcattacaaggattgaacaagaaggaaaccgctgaaaaatacggtgacgaccaagttcatatctggcgtcgttcttatgatgttttacctccattattgagtgccgatgatgaaggttcagccgttaacgatcgtcgttacgctgacttagaccctaacatcgtccctggtggcgaaaacttgaaggttaccttggaacgcgttatgcctttctgggaagaccaaatcgcacctaagttattagacggcaagaatgtaatcattgctgcccacggtaactcattacgtgccttaagcaagtacatcgaacaaatcagtgatgatgatatcatggaccttgaaatggctactggcgaaccagttgtctatgactttgatgaaaagttaaaggttcttggtaaggaaaagttaggcaaataa

SEQ ID NO: 6425 - protein, 230 aa, Lactobacillus plantarum
MAKLVLIRHGQSEWNLSNQFTGWVDVDLSEKGVEEAKAAGQKVKEAGLEFDYAFTSVLTRAIKTLHYVLEESDQLWIPETKTWRLNERHYGALQGLNKKETAEKYGDDQVHIWRRSYDVLPPLLSADDEGSAVNDRRYADLDPNIVPGGENLKVTLERVMPFWEDQIAPKLLDGKNVIIAAHGNSLRALSKYIEQISDDDIMDLEMATGEPVVYDFDEKLKVLGKEKLGK

SEQ ID NO: 6426 - DNA, 750 bp, Nitrosomonas europaea
  CDS (1)..(750): transl_table=11
atgaaaaaactcgttctcctgcgacacggagaaagtatctggaatcaggaaaatcgctttaccggctggactgacgtcgatttaacgcccaagggactaaaagaagccgaagaggcaggcagattgcttcgcgaaaacggtttctccttcgacattgcttatacatctctactcaaacgggcaattcgtacactctggatcgcactggacgaaatggatcagatgtggaccccgatcgagctcaactggcgactcaatgaacggcattacggggcacttcagggtttgaacaaagcagaaaccgccaaacaatatggcgatgaacaagtactcgtctggagacgcagttacgatatccgcccaccttccatcacaatcaacgacgaacgctatcccggctttgatcttcgctacagaaacatgtcatccggcgatattccgcttgctgaaagtctcaaggatacggttgcaagatttctgccctactggaatcagtcaatcgctccacaaatcaaggcagaaaaaaaggtaatcattgctgcacatggaaattcgctgcgcgctctgatcaaacacctcgataatatctcggaccaggatatcctgaattgcaatatacccacagggattccgctagtttatgaactggatgacgacttgaaaccactcaacagttactatctgggagatgctggccaaattggggaagccatttcggcggtcgccaatcagggtaaatccggagcttga

SEQ ID NO: 6427 - protein, 249 aa, Nitrosomonas europaea
MKKLVLLRHGESIWNQENRFTGWTDVDLTPKGLKEAEEAGRLLRENGFSFDIAYTSLLKRAIRTLWIALDEMDQMWTPIELNWRLNERHYGALQGLNKAETAKQYGDEQVLVWRRSYDIRPPSITINDERYPGFDLRYRNMSSGDIPLAESLKDTVARFLPYWNQSIAPQIKAEKKVIIAAHGNSLRALIKHLDNISDQDILNCNIPTGIPLVYELDDDLKPLNSYYLGDAGQIGEAISAVANQGKSGA

SEQ ID NO: 6428 - DNA, 738 bp, Bacillus anthracis
  CDS (1)..(738): transl_table=11
atgataaaacttgtacttattcgtcacggacaaagtttatggaatcttgaaaatcgttttactggttggactgatgtagatttatcagagaatggattaagtgaagcgagagaagcaggagcgatattaaagaaaaatggatatacttttgatgtagcttatacatctgtattaaaacgagcaattcggacgttatggattgtacttcatgagatggaccttgcatgggtgccagtacataaatgttggaagttaaatgaaagacattacggtgcattgcaagggttgaataaagatgaaactgcgaaaaaatatggtgaggagcaagttcatatttggagaagaagtattgatgtaagaccacctgctcttactgaggatgatcccaggtatgaaatgaatgatctaagatataaagcactgaaaaaaggtgagtttccattgacagaatgtttagtggatacggagaaaagagtacttgattattggcattcagaaattgcgccgaaattaaagaatggtaacaaagtaatcatttcatcacatggtaacacaattcgctcgctagtaaaatatttagataatctttcaagcgatggtgttgtttcactaaatattccaacgagtattccgctcgtgtatgaattagacgaaaatttacgtccgattcgccattattacttaagtatggatggagaagtacctgaaggagaaattccgaaacatattactttttaa

SEQ ID NO: 6429 - protein, 245 aa, Bacillus anthracis
MIKLVLIRHGQSLWNLENRFTGWTDVDLSENGLSEAREAGAILKKNGYTFDVAYTSVLKRAIRTLWIVLHEMDLAWVPVHKCWKLNERHYGALQGLNKDETAKKYGEEQVHIWRRSIDVRPPALTEDDPRYEMNDLRYKALKKGEFPLTECLVDTEKRVLDYWHSEIAPKLKNGNKVIISSHGNTIRSLVKYLDNLSSDGVVSLNIPTSIPLVYELDENLRPIRHYYLSMDGEVPEGEIPKHITF

SEQ ID NO: 6430 - DNA, 738 bp, Bacillus cereus
  CDS (1)..(738): transl_table=11
atgataaaacttgtacttattcgtcacggacaaagcttatggaatcttgaaaatcgctttacgggatggacagatgttgatctatcagagaatggattaagtgaagcgagagaagcaggagcaatattaaagaaaaacggatatacttttgatgtggcttatacatcagtattaaaacgcgcaattcggacgttatggattgtacttcatgagatggatcttacttgggttccaatacataaatcttggaagctaaatgaaagacattatggtgcattgcaagggctgaataaagatgaaactgcacaaaaatatggtgaggagcaagttcatatttggagaagaagtgttgatgtaagaccaccggctcttactgaagacgatcctcgatatgaagcgaccgatccaagatataaaacactcaaaaaaggtgaatttccattaactgaatgtttagaggatacggagaagagagtacttgcttattggcattcagaaattgcgccgacattaaaaagtggtaataaagtaattatttcatcacacggtaacacaattcgctcgctagtaaaatatttagacaacctttcaagtgatggtgtagtttcattaaatattcccactagcattccgcttgtttatgaattagacgaaaacttacgtccgattcgtcattattatttaagtatggatggagaagtacctgaaggggaaattccgaaacatatttctttttaa

SEQ ID NO: 6431 - protein, 245 aa, Bacillus cereus
MIKLVLIRHGQSLWNLENRFTGWTDVDLSENGLSEAREAGAILKKNGYTFDVAYTSVLKRAIRTLWIVLHEMDLTWVPIHKSWKLNERHYGALQGLNKDETAQKYGEEQVHIWRRSVDVRPPALTEDDPRYEATDPRYKTLKKGEFPLTECLEDTEKRVLAYWHSEIAPTLKSGNKVIISSHGNTIRSLVKYLDNLSSDGVVSLNIPTSIPLVYELDENLRPIRHYYLSMDGEVPEGEIPKHISF

SEQ ID NO: 6432 - DNA, 621 bp, Bartonella henselae
  CDS (1)..(621): transl_table=11
atggaacgcacacttgtactcattcgtcatggacaaagtgaatggaatctcaaaaatctctttaccggttggaaggaccctggtttaacagaaaaaggccgtaccgaagcaatagcagcaggtaagaaacttaaagaaactggtttaaaatttgatatcgcttatacatctgctctacagcgtgcacaaaaaacagcccagaacatcttagaacaaatggaacaatcagatttagaactgataaaaacccccgcactgaatgaacgaaattatggtgatctctctggtttgaataaagatgaagtgcgtcaaaaatggggagaacagcaagtgcaaatatggcgccgctcctatactattgctccccctaatggagaaagccttcgcgatactggtgctcgtgtttggccttattatcttcaccatatccaacctcatattttgcgctctcaaactgttttgatcgcagcacacggtaactctcttcgtgctcttattatggcacttgaaggcttaaatagtgaggaaattatctctcaagaattagcaactggcattcctatagtttatacatttaattcggactcaacaatttcgtcaaagacaatcatcaccccttaa

SEQ ID NO: 6433 - protein, 206 aa, Bartonella henselae
MERTLVLIRHGQSEWNLKNLFTGWKDPGLTEKGRTEAIAAGKKLKETGLKFDIAYTSALQRAQKTAQNILEQMEQSDLELIKTPALNERNYGDLSGLNKDEVRQKWGEQQVQIWRRSYTIAPPNGESLRDTGARVWPYYLHHIQPHILRSQTVLIAAHGNSLRALIMALEGLNSEEIISQELATGIPIVYTFNSDSTISSKTIITP

SEQ ID NO: 6434 - DNA, 747 bp, Bdellovibrio bacteriovorus
  CDS (1)..(747): transl_table=11
gtgtataagttggtgctaattcgacacggcgaaagtgtgtggaaccaggaaaatcgcttcactggctggcaggacgtagatctttctgaaaaaggtcgagcggaagctctaaagggcggcaaagctcttcgcgaaaaaggcttcagtttcgacgttgcatacacaagcgtgctgaaaagagcgattaaaactctgaatttcgtattggatgaagtggatcaggtgtggcttccagtccacaaagactggcgtttgaacgaaagacactacggagcccttcagggactgaacaaagctgagaccgcagctcgtcatggtgaagagcaagtgaagatctggcgtcgcagttacgacactccgccacctccgatggaagtgagcgaccctcgtcatccttcccatgaccctcgttacaagaatgttgacgctcaacttttgcctagcaacgagtctttgaaagacaccgtggccagattccttccgttgtgggacggcacgatcgcacctgctgtaaaatcaggcaaaaatgtgctcatcgtggcccacgggaacagtttgcgtgccttgatgcagcatttggagggcatgaccccggacgagatcatgggcgtcaatatgccgaccgggatcccgatgatgtatgaattggacgcaaacttgaaggtcctgaaaaaggagttcattggcgatccggacgaggtcaaggcggcgattgaggccgtggccaaccaggggaaggcgaagtag

SEQ ID NO: 6435 - protein, 248 aa, Bdellovibrio bacteriovorus
MYKLVLIRHGESVWNQENRFTGWQDVDLSEKGRAEALKGGKALREKGFSFDVAYTSVLKRAIKTLNFVLDEVDQVWLPVHKDWRLNERHYGALQGLNKAETAARHGEEQVKIWRRSYDTPPPPMEVSDPRHPSHDPRYKNVDAQLLPSNESLKDTVARFLPLWDGTIAPAVKSGKNVLIVAHGNSLRALMQHLEGMTPDEIMGVNMPTGIPMMYELDANLKVLKKEFIGDPDEVKAAIEAVANQGKAK

SEQ ID NO: 6436 - DNA, 741 bp, Bifidobacterium longum
  CDS (1)..(741)
atgacttataaactagtactgctccgtcatggacagagcgcatggaataaaactaaccagttcaccggctgggtcgacgtaccgctgaccgagcagggtgaagccgaagccaagcgtggcggcgagctgctcaaggagaagaacgtccttccggacatcgtgttcacctccctgctgcgtcgcgccatcaacaccgccaacatcgctctggatgccgcagatcgtctgtggattccggttcagcgtgactggcgtctcaacgagcgtcactacggcgctctgcagggcaagaacaagaccgagatccgcgaagagtacggcgacgagaagttcatgctgtggcgccgttcttacgccaccccgccgcccgagatcgacccgaacgaccagtacgcccagaacaacgacccgcgctacgccggcgatccggttccggaagccgagtgcctggccaacgttgttgagcgtgtgaagccgtacttcgagtccgctatcgagccggagctcaaggccggcaagaccgtgctgattgctgcccacggcaactccctccgcgccatcgtcaagatgctggacaacctgtctgaggaagagatcgccaaggtcaacatcccgaccgccatcccgctgctctacgagctggacgagaacttcaagccgatcaagccgcgtggcgagtacctggacccggaggctgctgctgccggtgccgccgctgtcgccgctcagggccagaagtga

SEQ ID NO: 6437 - protein, 246 aa, Bifidobacterium longum
MTYKLVLLRHGQSAWNKTNQFTGWVDVPLTEQGEAEAKRGGELLKEKNVLPDIVFTSLLRRAINTANIALDAADRLWIPVQRDWRLNERHYGALQGKNKTEIREEYGDEKFMLWRRSYATPPPEIDPNDQYAQNNDPRYAGDPVPEAECLANVVERVKPYFESAIEPELKAGKTVLIAAHGNSLRAIVKMLDNLSEEEIAKVNIPTAIPLLYELDENFKPIKPRGEYLDPEAAAAGAAAVAAQGQK

SEQ ID NO: 6438 - DNA, 699 bp, Blochmannia floridanus
  CDS (1)..(699): transl_table=11
atgcatataattaaaacagtattaattagacatggagaaagtcaatggaataaagataatcgatttaccggatggatagacgttgatttatcaaatcaaggttattctgaagctaaacgcgctggccaattattaaaaaaatataaatttattttcgattatggatatacttctgtattaaaacgaactatacatactttatgggttatattggatcaattaaatcaaacatggttacctatacaaaaagtatggcagttgaatgaacgccattatggagcattacaaggattaaataaaaatgaagcaattaaaacatatggatatgacacaattcaaaaatggcgtcgcagttttaaagatattcctccaaaaaataataaaaatgatttatttttaggaactaatgatatacggtataaaaatattgaaactaatacattacctaatggggaaagtttagaattaacagcaaatagagttatcccatattggcaaaagtatatagaaccaaaaatttacaataataattgtattattattgttgctcatggaaattctataagagctattttaaaatttttaaatcaattagatgattctgagatatttaacattgaaattcctacaggaattccattaatatatgaatttgataataatataaaacccattcgatattattatctatctgaataa

SEQ ID NO: 6439 - protein, 232 aa, Blochmannia floridanus
MHIIKTVLIRHGESQWNKDNRFTGWIDVDLSNQGYSEAKRAGQLLKKYKFIFDYGYTSVLKRTIHTLWVILDQLNQTWLPIQKVWQLNERHYGALQGLNKNEAIKTYGYDTIQKWRRSFKDIPPKNNKNDLFLGTNDIRYKNIETNTLPNGESLELTANRVIPYWQKYIEPKIYNNNCIIIVAHGNSIRAILKFLNQLDDSEIFNIEIPTGIPLIYEFDNNIKPIRYYYLSE

SEQ ID NO: 6440 - DNA, 753 bp, Bordetella bronchiseptica
  CDS (1)..(753): transl_table=11
atgtacaaacttgttctgatgcgccacggcgaaagccagtggaacctggaaaaccgtttcacgggctggaccgatgtggacctgaccgaaaccggccgcgagcaggcccgcaaggcgggcgaattgctcaagcgcgagggctacgccttcgacctggcctatacctcggtgctcaagcgcgctatccgtacgctctggatcgccctggacgccatggacgccatgtataccccggtgggcatcaactggcgcctgaacgagcgccactacggccagctgcaaggcctgaacaaggccgagaccgccgccaagtacggcgacgagcaggtgctgatctggcgccgcgcctacgcgatcgccccggagccgctggacctggaagatccgcgccacccgcgtttcgatggccgctacgccaagattccggccgaccagctgccggccaccgaatgcctgaaggatacggtggcgcgcgtgctgccgttctggaacgaatcgatcgccccggccatccgcgccggccgccgcgtcctggtggccgcgcatggcaacagcctgcgcgcgctgatcaagcacctcgacaatgtttccgatgatgacatcgtgggcgtgaatattccgaccggccagcctctggtgtatgaattggatgaggacctgaagccgattcgccactattatctgggcgatgccgccgagatcgaggcggcgatggctgccgtggcggcgcagggcaaggcgaaaaaggactga

SEQ ID NO: 6441 - protein, 250 aa, Bordetella bronchiseptica
MYKLVLMRHGESQWNLENRFTGWTDVDLTETGREQARKAGELLKREGYAFDLAYTSVLKRAIRTLWIALDAMDAMYTPVGINWRLNERHYGQLQGLNKAETAAKYGDEQVLIWRRAYAIAPEPLDLEDPRHPRFDGRYAKIPADQLPATECLKDTVARVLPFWNESIAPAIRAGRRVLVAAHGNSLRALIKHLDNVSDDDIVGVNIPTGQPLVYELDEDLKPIRHYYLGDAAEIEAAMAAVAAQGKAKKD

SEQ ID NO: 6442 - DNA, 747 bp, Borrelia burgdorferi
  CDS (1)..(747)
atgtataaattagttttagtaagacacggagagagtgagtggaataaagaaaatctttttactggttggacagatgttaaactttctgacaagggtatcgatgaggctgttgaggcgggtttgcttctcaaacaagaaggctattcttttgatattgcttttagttctttgttgtcaagagctaatgacactttaaatattattttgcgagaattagggcaatcttatattagtgtaaaaaaaacctggagattaaatgaaaggcactatggagctttgcaaggtttaaataagtcagaaacagctgcaaaatatggggaagataaggttttaatttggagacgtagttatgatgtgcccccaatgtctttggatgagtctgatgatcgtcatcccataaaagatccaagatataaacatatccccaaaagggaacttccttcaacagagtgccttaaagatactgttgcaagagttattccttattggactgatgagattgcaaaagaagttcttgaaggtaaaaaagttattgttgctgctcacggtaattctttaagagcgcttgttaaatattttgacaatttaagtgaagaagatgttttaaagcttaacattcccacaggcattcctttagtttacgaattagataaagatttaaatcccattaaacattactatctaggtgatgagagcaaaattaaaaaggcaatggaatctgttgctagtcaaggaaagttaaagtaa

SEQ ID NO: 6443 - protein, 248 aa, Borrelia burgdorferi
MYKLVLVRHGESEWNKENLFTGWTDVKLSDKGIDEAVEAGLLLKQEGYSFDIAFSSLLSRANDTLNIILRELGQSYISVKKTWRLNERHYGALQGLNKSETAAKYGEDKVLIWRRSYDVPPMSLDESDDRHPIKDPRYKHIPKRELPSTECLKDTVARVIPYWTDEIAKEVLEGKKVIVAAHGNSLRALVKYFDNLSEEDVLKLNIPTGIPLVYELDKDLNPIKHYYLGDESKIKKAMESVASQGKLK

SEQ ID NO: 6444 - DNA, 753 bp, Bordetella parapertussis
  CDS (1)..(753): transl_table=11
atgtacaaacttgttctgatacgccacggcgaaagccagtggaacctggaaaaccgtttcacgggctggaccgatgtggacctgaccgaaaccggccgcgagcaggcccgcaaggcgggcgaattgctcaagcgcgagggctacgccttcgacctggcctatacctcggtgctcaagcgcgctatccgtacgctctggatcgccctggacgccctggacgccatgtataccccggtgggcatcaactggcgcctgaacgagcgccactacggccagctgcaaggcctgaacaaggccgagaccgccgccaagtacggcgacgagcaggtgctgatctggcgccgcgcctacgcgatcgccccggagccgctggacctggaagatccgcgccacccgcgtttcgatggccgctacgctaagattccggccgaccagctgccggccaccgaatgcctgaaggatacggtggcgcgcgtgctgccgttctggaacgaatcgatcgccccggccatccgcgccggccgccgcgtcctggtggccgcgcatggcaacagcctgcgcgcgctgatcaagcacctcgacaatgtttccgatgatgacatcgtgggcgtgaatattccgaccggccagcctctggtgtatgaattggatgaggacctgaagccgattcgccactattatctgggcgatgccgccgagatcgaggcggcgatggctgccgtggcggcgcagggcaaggcgaaaaaggactga

SEQ ID NO: 6445 - protein, 250 aa, Bordetella parapertussis
MYKLVLIRHGESQWNLENRFTGWTDVDLTETGREQARKAGELLKREGYAFDLAYTSVLKRAIRTLWIALDALDAMYTPVGINWRLNERHYGQLQGLNKAETAAKYGDEQVLIWRRAYAIAPEPLDLEDPRHPRFDGRYAKIPADQLPATECLKDTVARVLPFWNESIAPAIRAGRRVLVAAHGNSLRALIKHLDNVSDDDIVGVNIPTGQPLVYELDEDLKPIRHYYLGDAAEIEAAMAAVAAQGKAKKD

SEQ ID NO: 6446 - DNA, 624 bp, Bradyrhizobium japonicum
  CDS (1)..(624): transl_table=11
atgagcgaacgtcttctcgtgctcgtccgccacggccagagcgaatggaatctgaagaacctgttcacggggtggaaggatcctgatctcaccgagcagggcgtcgccgaggccagggaagccggccgcaagctgaaggcgcaggggctcgtgttcgacgtcgcctacacgtcggtgctgacgcgtgcgcagcacacgctcgacctcatcctcggcgagctcggccagaagggtctgcccacggagaagaacctcgcgctgaacgagcgcgactatggcgacctctccggcctcaacaaggacgacgcccgcaagaaatggggcgaggaccaggtcctgatctggcgccgctcctacgacgtgccgccgcccggcggcgaaagcctgaaggatacgctggcgcgtgcgctgccctattacgtgcaggagattttgcccagcgtgctcaacggcaagcgcacgctggtcgccgcccacggcaactcgctgcgcgccctgatcatggtgctggaaaagctgtcgccggaaggcatcctgaagcgcgagctcgcgacgggtgtgccgatcatctaccgcctgaatgcggattcgaccgtggcctcgaagctggatctggcggggtaa

SEQ ID NO: 6447 - protein, 207 aa, Bradyrhizobium japonicum
MSERLLVLVRHGQSEWNLKNLFTGWKDPDLTEQGVAEAREAGRKLKAQGLVFDVAYTSVLTRAQHTLDLILGELGQKGLPTEKNLALNERDYGDLSGLNKDDARKKWGEDQVLIWRRSYDVPPPGGESLKDTLARALPYYVQEILPSVLNGKRTLVAAHGNSLRALIMVLEKLSPEGILKRELATGVPIIYRLNADSTVASKLDLAG

SEQ ID NO: 6448 - DNA, 621 bp, Brucella melitensis
  CDS (1)..(621)
atgtctcgtaccctcgtcctggtccgccatggccaaagcgaatggaacctcaagaacctctttaccggctggcgtgatccgggcctcaccgagcagggccatgcggaagccaaggccgcaggccaacgcctcaaggcagccggcctgaagttcgacattgcctacacctccgccctttcccgcgcgcaagttacctgccagcacattctcgacgagcttggccagccgggccttgaaaccatccgcgaccaggccctgaacgagcgcgactatggcgatctctccggtctcaacaaggatgacgcccgcgcaaagtggggtgaggaacaggttcacatctggcgccgttcctatgacgtcccgcctccgggcggcgaaagcctgaaggacaccggcgcgcgcgtctggccctattaccttcacaccatccagccacatgtgctgcgcgaggagaccgttctggtcgccgcccatggcaattcgctgcgcgcactcatcatggcgctcgagggcctgacaccagaacagattctcaagcaggaactcaacaccggcgttccgatcatctaccggctcaatgccgattcgacggtcgcctcgaaggaaatcctcagcgcctga

SEQ ID NO: 6449 - protein, 206 aa, Brucella melitensis
MSRTLVLVRHGQSEWNLKNLFTGWRDPGLTEQGHAEAKAAGQRLKAAGLKFDIAYTSALSRAQVTCQHILDELGQPGLETIRDQALNERDYGDLSGLNKDDARAKWGEEQVHIWRRSYDVPPPGGESLKDTGARVWPYYLHTIQPHVLREETVLVAAHGNSLRALIMALEGLTPEQILKQELNTGVPIIYRLNADSTVASKEILSA

SEQ ID NO: 6450 - DNA, 621 bp, Brucella suis
  CDS (1)..(621): transl_table=11
atgtctcgtaccctcgtcctggtccgccatggccaaagcgaatggaacctcaagaacctctttaccggctggcgtgatccgggcctcaccgagcagggccatgcggaagccaaggccgcaggccaacgcctcaaggcagccggcctgaagttcgacattgcctacacctccgccctttcccgcgcgcaagttacctgccagcacattctcgacgagcttggccagccgggccttgaaaccatccgcgaccaggccctgaacgagcgcgactatggcgatctctccggtctcaacaaggatgacgcccgcgcaaagtggggtgaggaacaggttcacatctggcgccgttcctatgacgtcccgcctccgggcggcgaaagcctgaaggacaccggcgcgcgcgtctggccctattaccttcacaccatccagccacatgtgctgcgcgaggagaccgttctggtcgccgcccatggcaattcgctgcgcgcactcatcatggcgctcgacggcctgacaccagaacagattctcaagcaggaactcaacaccggcgttccgatcatctaccggctcaatgccgattcgacggtcgcctcgaaggaaatcctcagcgcctga

SEQ ID NO: 6451 - protein, 206 aa, Brucella suis
MSRTLVLVRHGQSEWNLKNLFTGWRDPGLTEQGHAEAKAAGQRLKAAGLKFDIAYTSALSRAQVTCQHILDELGQPGLETIRDQALNERDYGDLSGLNKDDARAKWGEEQVHIWRRSYDVPPPGGESLKDTGARVWPYYLHTIQPHVLREETVLVAAHGNSLRALIMALDGLTPEQILKQELNTGVPIIYRLNADSTVASKEILSA

SEQ ID NO: 6452 - DNA, 696 bp, Buchnera aphidicola subsp
  CDS (1)..(696): transl_table=11
atgaaaattaatcaagtagttttaattagacatggtcaaagcgaatggaatacattaaataaatttactggttggcatgatgctgaattagataaaaaaggaaaagatgaagctaaatttgctgctatcttattaaaaaaagaaaaatttttttttgattgcgcacatacatcattattaaaaagagcaattcatactttgcaatatattttagatgaattaaaccaaacctggttgtcagttaaaaaatcctggcgtttaaacgaacgacattatggtgcattagaagggttaaataaagatgaagttattgagaaatatggacaaaaacaagttcttctatggagaagaagttttgatattagtccacctcagattaatataaaagataaacgctttccaggaaacgatccacgctactctcatttaaatattcatgacatccctctaggagagagcttagaaaaaactgcaaaacgagttattccttattggaacaaaattgtttatccagaattaaaaaataataaaaaaatacttattgtagcgcatggaaattctttacgtgccttgatacaacacttatataaaatagacaataaagctattttggatttaaatattcctactgcacaacccattatcttagatttcgataatgaaaaaaatccaattaaatggcactatttaacataa

SEQ ID NO: 6453 - protein, 231 aa, Buchnera aphidicola subsp
MKINQVVLIRHGQSEWNTLNKFTGWHDAELDKKGKDEAKFAAILLKKEKFFFDCAHTSLLKRAIHTLQYILDELNQTWLSVKKSWRLNERHYGALEGLNKDEVIEKYGQKQVLLWRRSFDISPPQINIKDKRFPGNDPRYSHLNIHDIPLGESLEKTAKRVIPYWNKIVYPELKNNKKILIVAHGNSLRALIQHLYKIDNKAILDLNIPTAQPIILDFDNEKNPIKWHYLT

SEQ ID NO: 6454 - DNA, 693 bp, Buchnera aphidicola subsp
  CDS (1)..(693): transl_table=11
atgaaaactaataaattagtcttaattagacatggtcaaagtaaatggaataaattaaataaatttactggatggcatgatatagaattaagtgacaatggtataaatgaagctctaaaagccggttctctcttgaaaaaagaaaaattttttttcgattatgcacatacttctatgttaaaaagagcaatacatactttaagatatattttagatacattagatcaatcttggttaccagttcaaaaatcttggcgtttaaatgaaagacattatggtgcattggagggattaaataaagatgaaatgatttcaaaatacggtgaagaacaagtaaatttatggagacgaagttttgaaattataccacctcaaatcagattaaatgataaaagatttccaggaaatgatatacgttattcgaatatagataacaatgaacttccgttaggtgaaagtttagaattgactgcaaaaagagtgattccttattggaataaatttattttaccacaaataaaaaaaagaaatagagttcttattgtagcacatggaaattctctacgtgcattaattcaatttttaaataaaatagataataaaaaaattttagaattaaacattccaactgcaacgccaattatcctagaattcaatgaagaatataattctattaaatggtattatttataa

SEQ ID NO: 6455 - protein, 230 aa, Buchnera aphidicola subsp
MKTNKLVLIRHGQSKWNKLNKFTGWHDIELSDNGINEALKAGSLLKKEKFFFDYAHTSMLKRAIHTLRYILDTLDQSWLPVQKSWRLNERHYGALEGLNKDEMISKYGEEQVNLWRRSFEIIPPQIRLNDKRFPGNDIRYSNIDNNELPLGESLELTAKRVIPYWNKFILPQIKKRNRVLIVAHGNSLRALIQFLNKIDNKKILELNIPTATPIILEFNEEYNSIKWYYL

SEQ ID NO: 6456 - DNA, 699 bp, Buchnera aphidicola subsp
  CDS (1)..(699): transl_table=11
ttgaaagtatataaactagttttaatgcgacatggtgaaagtatatggaacgaattaaataaatttactggttggcatgacgtagatttatcaaaccgcggcgttcaagaatcgttgaaagcagcaaaattgttaaaaaaacacggtttttatttcgattacgcatattcatcggtgcttaaacgttcaattcatacgttatggaatattattaaatttcttgatcaatcatggattccagttaaaaagtcttggagattaaatgaacgtcattatggagctttagaaggactaaataaagatgatgtcattcaaaaatatggtaatgataaagtacagcaatggagaagaagttttaatatcgctcctcctaaaatatcatatttagaaaaaaaaaagttagctcatgattctagatataataatataaattttgatatactaccttattgcgaaagtttaaaattaactacgcaaagagtattaccatactggcttaacgaaattttcccgcgttttcaaaaaaacacaaagattattatagttgcgcatggaaattccttgagagccttgattaaatatttgaataacattaatgatatagatattttaaatttaaatattgctactggttttcctataatatatgaatttaactctgaatttaaacccattcaatattattatttaaaacaatag

SEQ ID NO: 6457 - protein, 232 aa, Buchnera aphidicola subsp
MKVYKLVLMRHGESIWNELNKFTGWHDVDLSNRGVQESLKAAKLLKKHGFYFDYAYSSVLKRSIHTLWNIIKFLDQSWIPVKKSWRLNERHYGALEGLNKDDVIQKYGNDKVQQWRRSFNIAPPKISYLEKKKLAHDSRYNNINFDILPYCESLKLTTQRVLPYWLNEIFPRFQKNTKIIIVAHGNSLRALIKYLNNINDIDILNLNIATGFPIIYEFNSEFKPIQYYYLKQ

SEQ ID NO: 6458 - DNA, 714 bp, Caulobacter crescentus
  CDS (1)..(714): transl_table=11
atgccgacgctcgtcctgctgcgccatggccaaagccagtggaacctggaaaaccgcttcaccggttgggttgatgtggacctcaccgctgagggcgaagctcaggcccggaagggcggcgagctgatcgctgcggccggcatcgagatcgaccgcttgttcacctcggttcagacccgcgccatccgcacaggcaatctggcgctggacgccgccaagcagagcttcgtccccgtgaccaaggactggcgcctgaacgagcgccactatggcgggctgaccggcctgaacaaggctgagaccgccgaaaagcacggcgtcgagcaggtgaccatctggcgccgttcgtacgatatcccgccgccggagctggcgccgggcggcgagtacgacttcagcaaggatcgccgctacaagggcgcaagcctgcccagcacggaaagcctggcgacgacgctggttcgcgttctgccctactgggaaagcgacatcgctccgcatctcaaggcgggtgagactgtgctgatcgccgcccacggcaactcgctgcgcgccatcgtcaagcatctgttcaacgtgccggacgaccagatcgtcggtgtggagattccgaccggcaatccgctggtgatcgacctggatgctgcgttgaagccgaccggcgcgcgctacctggacgacagtcgggctgaggcgcttcccaaagttggttaa

SEQ ID NO: 6459 - protein, 237 aa, Caulobacter crescentus
MPTLVLLRHGQSQWNLENRFTGWVDVDLTAEGEAQARKGGELIAAAGIEIDRLFTSVQTRAIRTGNLALDAAKQSFVPVTKDWRLNERHYGGLTGLNKAETAEKHGVEQVTIWRRSYDIPPPELAPGGEYDFSKDRRYKGASLPSTESLATTLVRVLPYWESDIAPHLKAGETVLIAAHGNSLRAIVKHLFNVPDDQIVGVEIPTGNPLVIDLDAALKPTGARYLDDSRAEALPKVG

SEQ ID NO: 6460 - DNA, 684 bp, Chlamydophila caviae
  CDS (1)..(684): transl_table=11
atggcttttcttatcttattacgacacggaaaatccgtctggaatgaaaaaaatctttttacaggatgggtagatatccctctaagtcaacaaggaattgatgaagctattcatgcgggtcaggtgataaaagatctcccgatagactgcatctttacctcgtctcttgttagaagtttgatgacagcgctgcttgctatgacacatcacagctctaaaaaaattccttatattattcatgatgatgagcagcagaaactgatgagtaggatctatagtgatgaagaaaagagtatgatccctctttatcgttctagcgcactaaacgaaagaatgtatggggagctgcaagggaaaaacaaaaaagagactgctgaggagtttggtgaagaacaggtaaaattatggagacgaagttataaaatctcgcctcctggaggagaaagtctctatgatacgggattgcgtacggttccctattttcaagaaacgatcttccctttattgaaaaattcaaaaaatgtgttcatttctgcacacgggaattctctacgctcactgattatggatatagaaaaattaagtgaggaagaggtactctctttagagttacctacaggaaaacccatagtatatttatggaccggccacacattcgaacgacatccagaaccacttggttaa

SEQ ID NO: 6461 - protein, 227 aa, Chlamydophila caviae
MAFLILLRHGKSVWNEKNLFTGWVDIPLSQQGIDEAIHAGQVIKDLPIDCIFTSSLVRSLMTALLAMTHHSSKKIPYIIHDDEQQKLMSRIYSDEEKSMIPLYRSSALNERMYGELQGKNKKETAEEFGEEQVKLWRRSYKISPPGGESLYDTGLRTVPYFQETIFPLLKNSKNVFISAHGNSLRSLIMDIEKLSEEEVLSLELPTGKPIVYLWTGHTFERHPEPLG

SEQ ID NO: 6462 - DNA, 681 bp, Chlamydia muridarum
  CDS (1)..(681): transl_table=11
atgactcttcttattctgctacgccacggtcaatccgtatggaatcaaaaaaatctatttactggatgggtagatatccctcttagtcaacaaggaattcaagaagcacttactgctggggaagcgattaaaaatcttcctattgattgtatttttacctctactctagtcagaagcttgatgacagctcttctagcaatgactaaccacagctctaaaaaaattccttatattattcatgaagaacgccccgatatgagtaggattcatagtgaaaaagagttggaacaaatgatccccctttttcaatcgagcgcgcttaatgagcgtatgtatggagaacttcaggggaaaaataaacaagaagttgcagagcaatttggagaagagcaggttagactctggcgtagaagctacaaaattgctccgccacaaggagaaagtctctttgatacggcgcaaagaactctcccttactttcaaaagcgcatttttcctcttatccaacagggaaaaaatatttttatttctgctcatgggaactctttacgctctttgatcatggacctagaaaaattaactgaagaagaagtactctctttagagttgccaacagggaaacctattgtatacgaatggacggaacaaaaattcacgaagagcgcactttcgtttggttaa

SEQ ID NO: 6463 - protein, 226 aa, Chlamydia muridarum
MTLLILLRHGQSVWNQKNLFTGWVDIPLSQQGIQEALTAGEAIKNLPIDCIFTSTLVRSLMTALLAMTNHSSKKIPYIIHEERPDMSRIHSEKELEQMIPLFQSSALNERMYGELQGKNKQEVAEQFGEEQVRLWRRSYKIAPPQGESLFDTAQRTLPYFQKRIFPLIQQGKNIFISAHGNSLRSLIMDLEKLTEEEVLSLELPTGKPIVYEWTEQKFTKSALSFG

SEQ ID NO: 6464 - DNA, 687 bp, Chlamydia pneumoniae
  CDS (1)..(687): transl_table=11
atggctcttcttattttattacgtcatggacaatctgtatggaatgaaaaaaatttattttctggatgggtagacattcctttaagccaacagggaattgaagaggctttttccgcaggaagagctattcaaaatttgcctatagactgcatctttacctctaccttagtacgtagtctgatgaccgccttactcgccatgacaaatcatcactctaagaagatcccctatattgttcatgaagatcccaaagcaaaagagatgtcgaggatctacagtgcggaagaagaaaacaatatgattcctctctatcaatctagtgccctcaacgaaagaatgtacggcgaacttcaaggaaaaaataaaaaacaaacagccgaacagttcggagaagagcgggtcaagctgtggaggcgcagctacaaaacagctcctcctcagggagaaagcctctatgatacgaaacaaaggaccttgccttactttgaaaaaaatattttgcctcaactgcaaaatggaaaaaacgtttttgtttctgcgcacggaaattccttacgctctttgattatggatctagaaaaattaagtgaagaagaggtactatctttagaattaccgacgggaaaaccagttgtatatcaatggaaaaaccacaaaatcgaaaagcacccagaattttttggttaa

SEQ ID NO: 6465 - protein, 228 aa, Chlamydia pneumoniae
MALLILLRHGQSVWNEKNLFSGWVDIPLSQQGIEEAFSAGRAIQNLPIDCIFTSTLVRSLMTALLAMTNHHSKKIPYIVHEDPKAKEMSRIYSAEEENNMIPLYQSSALNERMYGELQGKNKKQTAEQFGEERVKLWRRSYKTAPPQGESLYDTKQRTLPYFEKNILPQLQNGKNVFVSAHGNSLRSLIMDLEKLSEEEVLSLELPTGKPVVYQWKNHKIEKHPEFFG

SEQ ID NO: 6466 - DNA, 744 bp, Chlorobium tepidum
  CDS (1)..(744): transl_table=11
atgaagaaacttgtcctgctgaggcacggcgaaagccagtggaaccgggagaaccgtttcaccggatgggtggatgttgatctttccgagaaaggaagagaagaggcgagaaccgctggccagctgctcaaggatgagggtttcgtgtttgacctcgcctacacttcggtgctcaagcgcgccatcaggacgctctggacggtgctcgacgagatgaatctcatgtggattcccgtcacaaaaaactggcgtctcaacgaacgccattacggagcattgcaggggctcaacaaggcagagactgcccagcgccacggcgacgagcaggtgctgatctggcgccgcagctacgacacgccgccaccggctctcaccgagagcgatgagttctggccgggcaaggacccgcgctatgcttcgctgtcctctcaggaactgcctgccacggagtgcctgaaggatacggttgcgcgcttccttccctactggcacgagactattgcaccgcagattcgcgatggcaagaatgtcattattacagctcacggtaattcgctcagggcgctggtcaaatatctcgacaacatttcggatgaggatatcgtcggtctgaacattcctaccggtattccgctggtgtacgagcttgacgacgatctcaagccgctgaagagttactatctgggcgaccaggaggagctgaagaaaaaggtggaggtcgtcgtcaaacagggcaaagcctga

SEQ ID NO: 6467 - protein, 247 aa, Chlorobium tepidum
MKKLVLLRHGESQWNRENRFTGWVDVDLSEKGREEARTAGQLLKDEGFVFDLAYTSVLKRAIRTLWTVLDEMNLMWIPVTKNWRLNERHYGALQGLNKAETAQRHGDEQVLIWRRSYDTPPPALTESDEFWPGKDPRYASLSSQELPATECLKDTVARFLPYWHETIAPQIRDGKNVIITAHGNSLRALVKYLDNISDEDIVGLNIPTGIPLVYELDDDLKPLKSYYLGDQEELKKKVEVVVKQGKA

SEQ ID NO: 6468 - DNA, 681 bp, Chlamydia trachomatis
  CDS (1)..(681): transl_table=11
atgacgcttcttatcttgctacgccatggccaatccgtatggaatcaaaaaaatctgtttacaggctgggtagacatccctcttagccaacaaggaattcaagaggctattgccgctggagaatctattaaacatcttcctattgattgcatcttcacttccaccttggttagaagtttgataacagccctgttagcaatgactaaccacagctctcaaaaagttccttatatcgttcatgaagagcgccccgacatgagccggattcatagtcaaaaagaaatggagcagatgatccctctttttcaatctagcgctctcaatgaacgcatgtacggagaacttcaaggaaaaaataaacaagaagtcgctgctcaattcggagaagaacaggtaaaactgtggcgccgaagctaccgcattgcccctcctcagggcgaaagtcttttcgatacagggcaacgaaccctcccctattttcaagagagaattttccctctccttcagcaagggaaaaatatttttatctctgctcacgggaattctttgcgctccttaattatggacctagaaaaattatctgaagaacaagtactctctttggagttgccaacaggacagcctattgtatacgaatggacgggacaaaaattcacgaaacacgctccttctcttggttaa

SEQ ID NO: 6469 - protein, 226 aa, Chlamydia trachomatis
MTLLILLRHGQSVWNQKNLFTGWVDIPLSQQGIQEAIAAGESIKHLPIDCIFTSTLVRSLITALLAMTNHSSQKVPYIVHEERPDMSRIHSQKEMEQMIPLFQSSALNERMYGELQGKNKQEVAAQFGEEQVKLWRRSYRIAPPQGESLFDTGQRTLPYFQERIFPLLQQGKNIFISAHGNSLRSLIMDLEKLSEEQVLSLELPTGQPIVYEWTGQKFTKHAPSLG

SEQ ID NO: 6470 - DNA, 732 bp, Clostridium acetobutylicum
  CDS (1)..(732): transl_table=11
gtgagaaaacttgtgttattaagacacggtcaaagcgaatggaacaaagaaaacagatttactggctggactgatgttgatttatctgtagatggagttagcgaagccgctcaagcaggaagaatactgaaaaaaaataactatacctttgatgctgcttatacttcagtgcttaaaagagccataagaacacttcaaatagttctatatgaaatggaccttctatggatacccgtctataaatcctggaaattaaacgaaagacattatggtgcacttcaaggactaaacaaagatgaaactagagataaatatggagaagatcaagttcatctttggaggcgttctgttgaggtaagaccgcctgctttagaaaaatctgataaaagataccccggtaatgaaaaaaaatatgcttcgttaaaggaagaagaattgcctgttactgaaaatctagaagatacagaaaaaagggttttacaggactggcgtgaattaatagctcctaatataaagggaggtaagaatattataatttctgctcatggaaatactctaagagctcttgtaaaataccttgacaacataccaagcgatggaatagcaaatttaaatattcctactggaacccctttagtctatgagcttgatgaaaatttggaaccaataacacgctattacttaggtatggatggaaaaatagaggatgataaattccctaaaaaagtttaa

SEQ ID NO: 6471 - protein, 243 aa, Clostridium acetobutylicum
MRKLVLLRHGQSEWNKENRFTGWTDVDLSVDGVSEAAQAGRILKKNNYTFDAAYTSVLKRAIRTLQIVLYEMDLLWIPVYKSWKLNERHYGALQGLNKDETRDKYGEDQVHLWRRSVEVRPPALEKSDKRYPGNEKKYASLKEEELPVTENLEDTEKRVLQDWRELIAPNIKGGKNIIISAHGNTLRALVKYLDNIPSDGIANLNIPTGTPLVYELDENLEPITRYYLGMDGKIEDDKFPKKV

SEQ ID NO: 6472 - DNA, 747 bp, Corynebacterium diphtheriae
  CDS (1)..(747)
atgactactggaaaactgattcttcttcgtcacggacaaagcgaatggaacgcttccaaccaattcaccggctgggtggacgtcaacctcaccgaaaagggcgaggcagaggctaagcgcggcggcgagctgctcaaggctcagggggtcctgccaagcgtggtgtacacctctttgctgcgccgtgctatccgcaccgccaacattgctctgaacgctgctgatcgccattggatcccagttgttcgcgattggcgcctcaacgagcgccactacggtgcgctgcagggcctgaacaaggctgagactaaggaaaagtacggcgacgagcagttcatggcatggcgtcgttcttatggcaccccaccaccagagcttgaggattccagcgagttctcccaggcaaacgatcctcgttacgccaaccttgacgtggttcctcgcaccgagtgcttgaaggacgttgttgagcgtttcgttccttacttcaaggaagagatcctgccacgtgtgaagaacggtgagactgttttgatcgctgcacacggtaactccctgcgtgcattggtcaagcacctagacaacatctctgatgcagacatcgctgagctcaacatccctaccggtattccactggtttatgagctcgacgaggctggcacggtgctcaacccaggtggcacctaccttgacccagaagctgctgctgccggtgctgccgcagttgctgctcagggcgctaagtag

SEQ ID NO: 6473 - protein, 248 aa, Corynebacterium diphtheriae
MTTGKLILLRHGQSEWNASNQFTGWVDVNLTEKGEAEAKRGGELLKAQGVLPSVVYTSLLRRAIRTANIALNAADRHWIPVVRDWRLNERHYGALQGLNKAETKEKYGDEQFMAWRRSYGTPPPELEDSSEFSQANDPRYANLDVVPRTECLKDVVERFVPYFKEEILPRVKNGETVLIAAHGNSLRALVKHLDNISDADIAELNIPTGIPLVYELDEAGTVLNPGGTYLDPEAAAAGAAAVAAQGAK

SEQ ID NO: 6474 - DNA, 753 bp, Corynebacterium efficiens
  CDS (1)..(753): transl_table=11
ttggttatgactaacggaaaactgattcttcttcgtcacggacagagtgcgtggaacgcctccaaccagttcaccggatgggtggatgtcgacctgaccaccatcggtgaggccgaggccaagcgcggcggcgaactgctcgtggagaacaacgttctgcccgacgtggtctacacctccctgctgcgccgtgcgatccgcaccgccaacctggcgctggatgccgccgaccgccactggatccccgtggtgcgcgactggcgcctcaacgagcgtcactacggtgcgctgcagggcctgaacaaggccgagaccaaggacaagtacggcgatgagcagtacatggcgtggcgtcgttcctacggcaccccgccaccggagctcgccgatgacgccgagtactcccaggccggcgacgtgcgctacaaggacctggagtccgtcccacgcaccgagtgcctgaaggatgtcgtggagcgtttcatcccctacttcgaggaggagatcctcccgcgcgtgaagaagggcgagaacgtcctgatcgccgcgcacggcaactccctgcgcgccctggtcaagcacctggacaacatctccgatgatgacatcgccgagctgaacatccccaccggcatcccgctggtctacgagatcacccctgagggtaccgtggtcaaccccggtggtacctacctcgatcccgaggctgccgccgcaggtgcagccgccgtggccaaccagggcggtaagtag

SEQ ID NO: 6475 - protein, 250 aa, Corynebacterium efficiens
MVMTNGKLILLRHGQSAWNASNQFTGWVDVDLTTIGEAEAKRGGELLVENNVLPDVVYTSLLRRAIRTANLALDAADRHWIPVVRDWRLNERHYGALQGLNKAETKDKYGDEQYMAWRRSYGTPPPELADDAEYSQAGDVRYKDLESVPRTECLKDVVERFIPYFEEEILPRVKKGENVLIAAHGNSLRALVKHLDNISDDDIAELNIPTGIPLVYEITPEGTVVNPGGTYLDPEAAAAGAAAVANQGGK

SEQ ID NO: 6476 - DNA, 747 bp, Corynebacterium glutamicum
  CDS (1)..(747): transl_table=11
atgactaacggaaaattgattcttcttcgtcacggtcagagcgaatggaacgcatccaaccagttcactggatgggtcgacgtcaatctgaccgaacagggtgaggctgaggccaagcgcggaggcgaactcctcgtcgaggcaggcgtcctcccaggcgttgtatacacctccttgctgcgtcgcgcgatccgcactgcaaacatcgcactgaacgctgcagaccgccactggatcccagtgatccgcgactggcgcctcaacgagcgtcactacggcgcactgcagggccttgacaaggctgcaaccaaggaaaaatacggcgacgaccagttcatggaatggcgccgctcctacgacaccccaccaccagagctcgcggatgacgcagagtactcccaggcaaatgaccctcgttacgcggacctcgacgtagttccacgcaccgaatgcctcaaggacgttgtggttcgttttgttccttacttcgaggaagaaatcctgccacgcgcaaagaagggcgaaaccgtcctcatcgcagcacacggcaactccctgcgtgcgctggttaagcaccttgacggcatctccgatgctgatatcgcagagctcaacatcccaaccggcatcccactggtctacgaaatcgccgaagacggttccgtagtaaacccaggcggcacctacctcgatcctgaggcagcagcagccggcgcagcagcagtagcaaaccagggtaataagtag

SEQ ID NO: 6477 - protein, 248 aa, Corynebacterium glutamicum
MTNGKLILLRHGQSEWNASNQFTGWVDVNLTEQGEAEAKRGGELLVEAGVLPGVVYTSLLRRAIRTANIALNAADRHWIPVIRDWRLNERHYGALQGLDKAATKEKYGDDQFMEWRRSYDTPPPELADDAEYSQANDPRYADLDVVPRTECLKDVVVRFVPYFEEEILPRAKKGETVLIAAHGNSLRALVKHLDGISDADIAELNIPTGIPLVYEIAEDGSVVNPGGTYLDPEAAAAGAAAVANQGNK

SEQ ID NO: 6478 - DNA, 753 bp, Desulfovibrio vulgaris
  CDS (1)..(753): transl_table=11
atggcgcggctcatccttctcagacacgggcagagtgcatggaaccttgaaaaccgcttcaccgggtggacggacgtagacctctccccggcaggcgaagccgaggcactggccgcggcacggctcatccgggatgaagggctcgacttctccgtgtgccacacctccatgctgacccgtgccatacgcacgctgcatcttgtacagcaagaactggacaggctctggacgcccgtacgcaagcactggcgtctcaatgaacggcactacggggccctgcaggggctggacaaacgcgagaccgcggcacgacacggcgaagaccaggtcttcgtctggcggcgcagctacgatgtgccgccgcccgtcatcgcccccgacgacccgaagcaccccgtccacgacccccgctacgccgatgtgccccctgatgtccttccctgtggcgaaagccttgaagcgaccgtggcgcgggtactcccctactggtacgacgccatcgcccccgacctcatggcggggcgcgatgtgctggtggcggcccacggcaacagcctgcgcgcccttgtcatgcatcttgacgggcttgaccgcgaggatgtttcacgcctcgacatccccaccgggctgccccgcctgtacgaactggatgccgcactgcgccccgtgtcgtaccgctatctgggagacccggcagaggctgaggaacgggcacgcgccgtagccgcgcaggggcggctcgaaaagaactga

SEQ ID NO: 6479 - protein, 250 aa, Desulfovibrio vulgaris
MARLILLRHGQSAWNLENRFTGWTDVDLSPAGEAEALAAARLIRDEGLDFSVCHTSMLTRAIRTLHLVQQELDRLWTPVRKHWRLNERHYGALQGLDKRETAARHGEDQVFVWRRSYDVPPPVIAPDDPKHPVHDPRYADVPPDVLPCGESLEATVARVLPYWYDAIAPDLMAGRDVLVAAHGNSLRALVMHLDGLDREDVSRLDIPTGLPRLYELDAALRPVSYRYLGDPAEAEERARAVAAQGRLEKN

SEQ ID NO: 6480 - DNA, 753 bp, Escherichia coli O157
  CDS (1)..(753)
atggctgtaactaagctggttctggttcgtcatggcgaaagtcagtggaacaaagaaaaccgtttcaccggttggtacgacgtggatctgtctgagaaaggcgtaagcgaagcaaaagcagcaggtaagctgctgaaagaggaaggttacagctttgactttgcttacacctctgtgctgaaacgcgctatccataccctgtggaatgtgctggacgaactggatcaggcatggctgcccgttgagaaatcctggaaactgaacgaacgtcactacggtgcgttgcagggtctgaacaaagcggaaactgctgaaaaatatggcgacgagcaggtgaaacagtggcgtcgtggttttgcagtgactccgccggaactgactaaagatgatgagcgttatccgggtcacgatccgcgttacgcgaaactgagcgagaaagaactgccgctgacggaaagcctggcgctgaccattgaccgcgtgatcccttactggaatgaaaccattctgccgcgtatgaagagcggtgagcgcgtaatcatcgctgcacacggtaactcgttacgtgcgctggtgaaatatctcgataacatgagcgaagaagagattcttgagctgaatatcccgaccggcgtgccgctggtttatgagtttgacgagaacttcaaaccgctgaaacgctattatctgggtaatgctgacgagatcgcggcgaaagcagcagccgttgcgaaccagggtaaagcgaagtaa

SEQ ID NO: 6481 - protein, 250 aa, Escherichia coli O157; identical to SEQ ID NO: 6353

SEQ ID NO: 6482 - DNA, 687 bp, Enterococcus faecalis
  CDS (1)..(687): transl_table=11
atgccaaaattagttttttctcgtcatggacttagcgaatggaatgccttaaaccaatttactggatgggctgacgtagatttagcacctgaaggtgttgaagaagcaaaagaaggcggccgtaaaattaaagaagcaggcatcgaattcgacgttgcttatacttctgttttaactcgtgccatcaaaacttgtaactatttactagaatactcagatcaattatgggtacctcaaatcaaatcttggcgcttaaacgaacgtcactatggtaaattacaaggactaaacaaaaaagaaactgctgaaaaatacggagacgaacaagtccacatctggcgtcgttcttacgatactcttcctccattaatggaagcaacagatgaaggttctgcagcaaacgaccgtcgttatgcaatgttagaccaacgcgatattcctggtggcgaaaacttgaaagttactttggaacgtgcattaccattctggcaagatgaaattgcgccagctttaaaagacaacaaaactgttttagtagcggctcatggtaattcattacgtgctttagctaaacacatcgaaggcatttctgatgaagatattatggatcttgaaatcccaacaggtaaaccattagtttatgaattaaacgatgatttaactgtgaaagaaaaatactacttataa

SEQ ID NO: 6483 - protein, 228 aa, Enterococcus faecalis
MPKLVFSRHGLSEWNALNQFTGWADVDLAPEGVEEAKEGGRKIKEAGIEFDVAYTSVLTRAIKTCNYLLEYSDQLWVPQIKSWRLNERHYGKLQGLNKKETAEKYGDEQVHIWRRSYDTLPPLMEATDEGSAANDRRYAMLDQRDIPGGENLKVTLERALPFWQDEIAPALKDNKTVLVAAHGNSLRALAKHIEGISDEDIMDLEIPTGKPLVYELNDDLTVKEKYYL

SEQ ID NO: 6484 - DNA, 687 bp, Fusobacterium nucleatum subsp
  CDS (1)..(687): transl_table=11
atgaaattagttttaattcgtcatggagaaagtgcatggaacttagaaaatagatttacagggtggaaagatgttgatttaagtccaaaaggaatggaagaagcaaaatcagcaggaaaaattttaaaagaaatgaatttagtttttgatgttgcctatacttcatatttaaaaagagcaatcaaaactttaaatattgttttagaagaaatggatgaattatatattccagtatataaatcttggagattaaatgaaagacactatggagcattacaaggattaaataaagcagaaactgcaaaaaaatatggagatgaacaagtacatatttggcgtcgtagttttgatgtagctccaccaagtattgataaaaatagtgaatattatccaaagtcagatagaagatatgcagatttagcagattctgatattccattaggagagagtttaaaggatacaatagcaagagtattaccttactggcattctgatatttcaaaaagtttgcaagaagaaaaaaatgttatagttgctgctcatggaaatagtttaagagcattaataaaatatttattaaatatttctaatgaagatattttaaatctaaacttagttacaggaaaacctatggtatttgaaatagataaagatttaaaagtgttatcttcacctgaattattttaa

SEQ ID NO: 6485 - protein, 228 aa, Fusobacterium nucleatum subsp
MKLVLIRHGESAWNLENRFTGWKDVDLSPKGMEEAKSAGKILKEMNLVFDVAYTSYLKRAIKTLNIVLEEMDELYIPVYKSWRLNERHYGALQGLNKAETAKKYGDEQVHIWRRSFDVAPPSIDKNSEYYPKSDRRYADLADSDIPLGESLKDTIARVLPYWHSDISKSLQEEKNVIVAAHGNSLRALIKYLLNISNEDILNLNLVTGKPMVFEIDKDLKVLSSPELF

SEQ ID NO: 6486 - DNA, 744 bp, Geobacter sulfurreducens
  CDS (1)..(744): transl_table=11
atgagaacgctcgttctgattcgtcatggggagagtgtctggaacagggaaaaccgttttaccggctggactgacgtggggctgaccgataagggcgcggcagaggccctgcgtgccggtcgtaccctgaaaaacgaggggtttgcctttgacgaggcgttcacctcagtgctcaagcgggccatcaaaaccctctggatcgttttggaggagatggatcagatgtggattccggagcaccgtcactggcggcttaatgaacgccactacggcgcgctccagggactcaataaggccgaaactgccgaaaggcacggcatggaacaagttcatgtctggcgccgcagctatgatattccgccaccgcccctggccgccggcgatccgcgcaaccctgcacgggacccgcgctatgcggagcttgatcccgcagatatccccctgaccgagtcgctcaaggataccgtagcccgtttccttccctactggcacgagacgattgcgccccgcattctcgcgggccgccgcctgctcatcgccgcccatggcaacagtctgcgggccctggtgaagtacctggacggcatcggggacgacgccattgccggtctgaatattcccaccggcattccccttgtctatgagctggaagatgacctgcaccccatacgaagctattacctgggtgatcctgacgaggttgcccgggccacccagtcggtggcggatcaggtaaagaggtag

SEQ ID NO: 6487 - protein, 247 aa, Geobacter sulfurreducens
MRTLVLIRHGESVWNRENRFTGWTDVGLTDKGAAEALRAGRTLKNEGFAFDEAFTSVLKRAIKTLWIVLEEMDQMWIPEHRHWRLNERHYGALQGLNKAETAERHGMEQVHVWRRSYDIPPPPLAAGDPRNPARDPRYAELDPADIPLTESLKDTVARFLPYWHETIAPRILAGRRLLIAAHGNSLRALVKYLDGIGDDAIAGLNIPTGIPLVYELEDDLHPIRSYYLGDPDEVARATQSVADQVKR

SEQ ID NO: 6488 - DNA, 684 bp, Haemophilus ducreyi
  CDS (1)..(684): transl_table=11
atggaattagtatttattcgtcacggatttagtgaatggaatgcgaaaaacttatttactggttggcgcgatgtgaatctaaccgaacgaggcgttgaagaagcaaaagccgcaggccaaaaactcttagctgcgggatatgaatttgatatcgcattcacttccgtactgactcgtgcaatcaaaacgtgtaatattgtattagaagaatctaatcaattatggattccacaggtgaaacattggcgtttaaatgagcgtcattatggtgaattacaaggcttagataaaaaagccacggcagaaaaatatggcgatgaacaagtacatatttggcgccgttcttatgataccctaccaccactattagcaccatcagatccaaattcagcccataatgatcgccgttatgcgcacctacccaaagaagttgtgccaaatggcgagaatttaaaagtcactttagaacgtgttctgccattttgggaagatcaaattgccccggcattattatctggcaaacgcgttttagtaacggcccacggtaattcattacgcgcacttgccaaacatattatcgggatttctgatgctgaaattatggactttgagattccaacaggtcaaccattagttttaaaattagacagcaaattaaatttcattgaaaaattttatttataa

SEQ ID NO: 6489 - protein, 227 aa, Haemophilus ducreyi
MELVFIRHGFSEWNAKNLFTGWRDVNLTERGVEEAKAAGQKLLAAGYEFDIAFTSVLTRAIKTCNIVLEESNQLWIPQVKHWRLNERHYGELQGLDKKATAEKYGDEQVHIWRRSYDTLPPLLAPSDPNSAHNDRRYAHLPKEVVPNGENLKVTLERVLPFWEDQIAPALLSGKRVLVTAHGNSLRALAKHIIGISDAEIMDFEIPTGQPLVLKLDSKLNFIEKFYL

SEQ ID NO: 6490 - DNA, 684 bp, Haemophilus influenzae
  CDS (1)..(684): transl_table=11
atggaattagtatttatccgtcacggttttagtgaatggaatgcgaaaaacttattcacaggctggcgtgatgtgaatttaactgaacgtggtgtggaagaagcaaaaactgcgggtaaaaaactgttagacaaaggttatgaatttgatatcgcatttacctctgttttaactcgagcaatcaaaacttgtaacatcgtgttagaagaatcccatcaattatggattccgcaagtaaaaaactggcgtttaaatgaacgtcattatggtgctttacaaggtttagataaaaaagcgactgcggagcaatacggtgacgaacaagttcatatttggcgtcgttcttacgacatttctccaccagatttagatccacaagatccaaattctgcacacaatgaccgtcgctacgcaaatattccatctgatgttgtgccaaacgcagaaaatttaaaattaacattagaacgtgcattaccattctgggaagatcaaattgcaccagcaatgctttctggcaaacgtgttttagtggttgctcacggaaattcacttcgtgcgttggcaaaacatattatcggtatttctgatgctgaaattatggattttgaaattccaacaggccaacctttagtattaaaactagatgataaattaaattacgtagaacattactatctttaa

SEQ ID NO: 6491 - protein, 227 aa, Haemophilus influenzae
MELVFIRHGFSEWNAKNLFTGWRDVNLTERGVEEAKTAGKKLLDKGYEFDIAFTSVLTRAIKTCNIVLEESHQLWIPQVKNWRLNERHYGALQGLDKKATAEQYGDEQVHIWRRSYDISPPDLDPQDPNSAHNDRRYANIPSDVVPNAENLKLTLERALPFWEDQIAPAMLSGKRVLVVAHGNSLRALAKHIIGISDAEIMDFEIPTGQPLVLKLDDKLNYVEHYYL

SEQ ID NO: 6492 - DNA, 702 bp, Lactococcus lactis subsp
  CDS (1)..(702): transl_table=11
atgccaaaattagtatttgcacgtcacggtgaatctgaatggaatcttgctaaccttttcacaggttgggctgacgttgacctttctgaaaacggaactaaacaagcgattgaagctggtaaattgattaaagaagctggaatcgaatttgatattgcttacacttcagtattgaaacgtgctatcaaaacaactaaccttgctcttgaatattcagaccaactttgggtaccagttgttaaatcatggcgcttgaacgaacgtcactacggtggtttgacaggtttgaacaaagctgacgctgctgcaaaacatggtgatgaacaagttcacatctggcgtcgttcatatgatgtattgccaccagcaatggatcatgatgataaatatacagctcacggagaccgtcgttacgctggtcttgaagattcattgattcctgatgctgaaaacctcaaagttactttggaacgtgctcttccattctgggaagaccaaatcgctccagctttgaaagaaggaaaaaatgtcttcgttggtgctcacggtaactcaatccgtgcactcgttaaacaaatcaaaaaactttctgatgacgaaattatggatgttgaaatccctaacttcccaccacttgttttcgaatttgatgacaacttgaacgttcaaaacgaatactacttggctcctaaaaaagcataa

SEQ ID NO: 6493 - protein, 233 aa, Lactococcus lactis subsp
MPKLVFARHGESEWNLANLFTGWADVDLSENGTKQAIEAGKLIKEAGIEFDIAYTSVLKRAIKTTNLALEYSDQLWVPVVKSWRLNERHYGGLTGLNKADAAAKHGDEQVHIWRRSYDVLPPAMDHDDKYTAHGDRRYAGLEDSLIPDAENLKVTLERALPFWEDQIAPALKEGKNVFVGAHGNSIRALVKQIKKLSDDEIMDVEIPNFPPLVFEFDDNLNVQNEYYLAPKKA

SEQ ID NO: 6494 - DNA, 690 bp, Listeria innocua
  CDS (1)..(690): transl_table=11
atgaaattagtattaattcgtcatggtcaaagtgaatggaacaaattgaatttatttactggttggcatgatgttgacttatcagaagaaggcgttgtagaagcaatgacagcaggaaaacggattaaagaagctggcttggaatttgatgtagcttttacttccgttttaactagagctattaaaacgcttaattatgttttagaagaatctgatcaaatgtgggttccagtccataaatcatggcgtttaaacgaacgacattacggagcgcttcaaggacttaataaacaagaaactgctgaaaaatacggcgcagaccaagtacaaaaatggcgcagaagctacgatactcttccaccattattagaagaaaacgacgaaagacaagcgaaaaatgatcgccgttatcaacttcttgatacccatgcaattccatcgggtgaaaacttgaaagtaaccttagaacgagttattccttactggatggatacaattgcaccagaaattaaagcaggacgtcgtgtagttattgcagctcacggtaatagtttacgcgccttggtaaaattcttagaaggtattagtgatgacgaaattatggaacttgaaatcccaacaggtgtaccgcttgtatatgaattaaacgatgatttaaaaccagttaataaatattacttggataaataa

SEQ ID NO: 6495 - protein, 229 aa, Listeria innocua
MKLVLIRHGQSEWNKLNLFTGWHDVDLSEEGVVEAMTAGKRIKEAGLEFDVAFTSVLTRAIKTLNYVLEESDQMWVPVHKSWRLNERHYGALQGLNKQETAEKYGADQVQKWRRSYDTLPPLLEENDERQAKNDRRYQLLDTHAIPSGENLKVTLERVIPYWMDTIAPEIKAGRRVVIAAHGNSLRALVKFLEGISDDEIMELEIPTGVPLVYELNDDLKPVNKYYLDK

SEQ ID NO: 6496 - DNA, 690 bp, Listeria monocytogenes serotype 4b
  CDS (1)..(690): transl_table=11
atgaaattagtattaattcgtcatggtcaaagtgaatggaacaaattgaatttatttacaggttggcatgatgttgacttgtcacaagaaggcgttgtagaagcaatgactgcaggaaaaagaattaaagaagcgggcttagaattcgatgttgccttcacttctgttttaacgcgagctattaaaacacttaattatgtgttagaagaatctgaccaaatgtgggtaccagttcataaatcttggcgcttgaacgaacggcattatggcgcacttcaaggtcttaacaaacaagaaactgctgaaaaatatggtgctgaccaagtacaaaaatggcgcagaagctatgacactcttccaccgttattagaagaaaacgacgaaagacaagccaaaaatgatcgccgttatcaactccttgatacacacgctattccggcaggtgaaaacttgaaagtaacattagaacgcgttattccttattggatggacacgattgctccagaaattaaagaaggacggcgagtagtcatcgcggcgcatggtaacagtttacgagcattagtgaaatttctagaaggtattggcgatgatgaaataatggatttagaaattccgacaggcgtgccactagtatatgaattaaacgatgatttaaaaccagtaaataaatattacttggataaataa

SEQ ID NO: 6497 - protein, 229 aa, Listeria monocytogenes serotype 4b
MKLVLIRHGQSEWNKLNLFTGWHDVDLSQEGVVEAMTAGKRIKEAGLEFDVAFTSVLTRAIKTLNYVLEESDQMWVPVHKSWRLNERHYGALQGLNKQETAEKYGADQVQKWRRSYDTLPPLLEENDERQAKNDRRYQLLDTHAIPAGENLKVTLERVIPYWMDTIAPEIKEGRRVVIAAHGNSLRALVKFLEGIGDDEIMDLEIPTGVPLVYELNDDLKPVNKYYLDK

SEQ ID NO: 6498 - DNA, 690 bp, Listeria monocytogenes
  CDS (1)..(690): transl_table=11
atgaaattagtattaattcgtcatggtcaaagtgaatggaacaaattgaacctatttacaggttggcatgatgtggacttgtcgcaagaaggcgttgtggaagcaatgacagcaggaaaaagaattaaagaggcaggcttagaattcgatgttgccttcacttctgttttaacacgagctattaaaacacttaattatgtgttagaagaatctgaccaaatgtgggtaccagttcataaatcttggcgcttgaacgaacgtcattacggcgcacttcaaggacttaataaacaagaaactgctgaaaaatatggtgctgaccaagtacaaaaatggcgtagaagctatgacacacttccaccattactagaagaaaacgacgaaagacaagcaaaaaatgatcgtcgttatcaactccttgatacacacgctattccatcaggtgaaaacttgaaagtaacattagaacgcgttattccttattggatggacacaattgctccagaaattaaagaaggacgacgagtagtcatcgcggcgcatggtaacagtttacgagcattagtgaaattcctagaaggtattagtgatgatgaaataatggatttagaaattccaacaggcgtaccgctagtatatgaattaaacgctgatttaaaaccagtaaataaatattacttggataaataa

SEQ ID NO: 6499 - protein, 229 aa, Listeria monocytogenes
MKLVLIRHGQSEWNKLNLFTGWHDVDLSQEGVVEAMTAGKRIKEAGLEFDVAFTSVLTRAIKTLNYVLEESDQMWVPVHKSWRLNERHYGALQGLNKQETAEKYGADQVQKWRRSYDTLPPLLEENDERQAKNDRRYQLLDTHAIPSGENLKVTLERVIPYWMDTIAPEIKEGRRVVIAAHGNSLRALVKFLEGISDDEIMDLEIPTGVPLVYELNADLKPVNKYYLDK

SEQ ID NO: 6500 - DNA, 726 bp, Methanosarcina mazei
  CDS (1)..(726): transl_table=11
gtgataatcacgggtcatcttatacttgtcaggcatggagaacctggcctgaagccaggggaaaggctttcgggctggattgacatcccgttaagcaggaaaggcatagaagaagcacttgaatgtgcgaaagcgcttgaaaacatagaaatagacattgcttttgcatcagaccttgtccgaacacaggaaacccttttcatcatactttcgggccagaaaaaaacaggggttgttgtacacgagaaaacagaagataaagtgcccccggaaaagcttgactggtattcctaccccgaaaagctcggagaagaccttatcccggtttatacgactcctgctctgaacgagcgttactacggcaaacttcagggcagaaaaaagcagaaaatggaagaaaaatacggtgcagaacaggtagcaaactggcgctggaactttgaaccgggccctccggaaggggaaagcttgaaagctgtctatgagcgcacagttccctatttccgaaaaaaagtcatgcctgcccttgaaggaggaaaaaatgtgctgatctgcgcccaccagagcagcctgagggctcttgtcaaatacatagaggatatttccgacaaagatatcagggaagtaaggttgtccactggagagcttgcaatttaccatttttccgaaggaaaacttgtcagggaaaatgaagagctcggacctgagctgaaaaggaatatttaa

SEQ ID NO: 6501 - protein, 241 aa, Methanosarcina mazei
MIITGHLILVRHGEPGLKPGERLSGWIDIPLSRKGIEEALECAKALENIEIDIAFASDLVRTQETLFIILSGQKKTGVVVHEKTEDKVPPEKLDWYSYPEKLGEDLIPVYTTPALNERYYGKLQGRKKQKMEEKYGAEQVANWRWNFEPGPPEGESLKAVYERTVPYFRKKVMPALEGGKNVLICAHQSSLRALVKYIEDISDKDIREVRLSTGELAIYHFSEGKLVRENEELGPELKRNI

SEQ ID NO: 6502 - DNA, 750 bp, Mycobacterium bovis
  CDS (1)..(750): transl_table=11
atggcaaacactggcagcctggtgttgctgcgccacggcgagagcgactggaatgccctcaacctgttcaccggctgggtcgatgtcggcctgacggacaagggccaggcagaggcggttcgaagcggcgagctgatcgcggaacacgacctattgcccgacgtgctctacacctcgttgctgcggcgcgcgatcaccaccgcgcatctggcgttggacagcgccgatcggctctggattcccgtgcggcgtagctggcggctcaacgaacgccactacggcgcgctgcagggtttggacaaggccgagaccaaggcccgctatggcgaagagcagttcatggcctggcggcgcagctatgacacgccgccgccgccgatcgagcggggcagtcagttcagccaggacgccgaccctcgttacgccgacatcggcggtggcccgctcaccgaatgtctggctgacgtggtcgcccggtttttgccatatttcaccgacgtcatcgttggcgacttgcgggtcggcaagacggtgctgatcgttgcccacggcaactcgttgcgcgcgctggtcaagcacctggaccagatgtctgacgacgaaatcgtcggactgaacatcccgaccggaattccgctgcgctacgacctggattccgcgatgaggccgctggtgcgcggtggtacgtatctggacccggaggcggcagccgccggcgccgccgcggtggccggccagggccgcgggtaa

SEQ ID NO: 6503 - protein, 249 aa, Mycobacterium bovis
MANTGSLVLLRHGESDWNALNLFTGWVDVGLTDKGQAEAVRSGELIAEHDLLPDVLYTSLLRRAITTAHLALDSADRLWIPVRRSWRLNERHYGALQGLDKAETKARYGEEQFMAWRRSYDTPPPPIERGSQFSQDADPRYADIGGGPLTECLADVVARFLPYFTDVIVGDLRVGKTVLIVAHGNSLRALVKHLDQMSDDEIVGLNIPTGIPLRYDLDSAMRPLVRGGTYLDPEAAAAGAAAVAGQGRG

SEQ ID NO: 6504 - DNA, 744 bp, Mycobacterium leprae
  CDS (1)..(744): transl_table=11
atgcaacagggtaacactgctacgctgattctactccgtcatggcgagagtgactggaatgcccggaatctgttcaccggttgggtggacgtcgggctaaccgacaagggtcgagcggaggcggtccgcagcggtgagttgcttgccgagcacaatctgttgcccgacgtgttgtacacgtcgctgttgcgccgcgctatcaccactgcgcatctggcgttagacaccgccgactggctatggattccggtccgtcgcagctggcggctcaatgaacgtcactacggcgcgcttcagggtctggacaaggccgtgaccaaggcccgctacggcgaagaacgattcatggcttggcgccgcagctacgacactccgccaccaccgatcgagaagggtagcgagttcagccaggatgctgaccctcgctacaccgacattggcggcgggccgctgaccgaatgcctggctgatgtggtgacccgcttcctgccgtatttcaccgacgtgatagtccccgatctgcggaccggcagaacggtgctcattgtggcgcacggcaactcgctgcgcgcgctggtcaaacacctagacgagatgtccgacgacgaggtcgtcgggcttaacgttccgactggcattccgctgcgctatgatctagatgccgatctgcgtccggtggtacccggtggtacctacctcgaccccgaggcggccgctgcggtaatcagtcaagcgcgcccgtaa

SEQ ID NO: 6505 - protein, 247 aa, Mycobacterium leprae
MQQGNTATLILLRHGESDWNARNLFTGWVDVGLTDKGRAEAVRSGELLAEHNLLPDVLYTSLLRRAITTAHLALDTADWLWIPVRRSWRLNERHYGALQGLDKAVTKARYGEERFMAWRRSYDTPPPPIEKGSEFSQDADPRYTDIGGGPLTECLADVVTRFLPYFTDVIVPDLRTGRTVLIVAHGNSLRALVKHLDEMSDDEVVGLNVPTGIPLRYDLDADLRPVVPGGTYLDPEAAAAVISQARP

SEQ ID NO: 6506 - DNA, 750 bp, Mycobacterium paratuberculosis
  CDS (1)..(750): transl_table=11
atgggtgagactgccacgctggtactgctgcgccacggcgaaagcgaatggaactcgctgaacctgttcaccggttgggtggacgtcgggctgaccgacaagggccgcgccgaggcggtgcgcagcggcgagctgctggccgagcagggcctgctgcccgacgcgctctacacgtcgctgctgcgccgcgcgatcaccaccgcgcatctggccctggacgccgcggaccggctgtggatcccggtgcggcgcagctggcggctcaacgaacgccactacggggcgctgcagggcctggacaaggccgagacgaaggcgcgctacggcgaggagcagttcatggcctggcgacgcagctatgacacgccgccgccgccgatcgagcggggcagcacctacagccaggacgccgatccgcgctacgccgacatcggcggcgggccgctgaccgagtgcctggccgacgtggtcgtccggttcctgccgtacttcaccgacgtcatcgtcccggacctgcgcagcggcaagacggtgctgatcgtcgcgcacggcaactcgctgcgcgccctggtcaagcacctcgatcagatgtccgacgacgacgtcgtggggctgaacatcccgaccggcatcccgctgcgctacgacttggacgcccggctgcggccgctggttcccggcggcacctacctcgaccccgaggcggccgccgccggcgccgccgcggttgccagccaggggcgcggctga

SEQ ID NO: 6507 - protein, 249 aa, Mycobacterium paratuberculosis
MGETATLVLLRHGESEWNSLNLFTGWVDVGLTDKGRAEAVRSGELLAEQGLLPDALYTSLLRRAITTAHLALDAADRLWIPVRRSWRLNERHYGALQGLDKAETKARYGEEQFMAWRRSYDTPPPPIERGSTYSQDADPRYADIGGGPLTECLADVVVRFLPYFTDVIVPDLRSGKTVLIVAHGNSLRALVKHLDQMSDDDVVGLNIPTGIPLRYDLDARLRPLVPGGTYLDPEAAAAGAAAVASQGRG

SEQ ID NO: 6508 - DNA, 684 bp, Neisseria meningitidis serogroup A
  CDS (1)..(684): transl_table=11
atggaattggtatttatccgccacggacaaagcgaatggaacgcgaaaaacctgtttacaggctggcgcgacgtgaagctgagcgagcaggggcttgccgaggctgctgccgccggtaaaaaactgaaagaaaacggctatgagttcgacatcgccttcacatccgtcctgacccgcgcgattaagacctgcaacatcgttttggaagaatccgaccaactgttcgtaccgcaaatcaaaacatggcggctgaacgaacgccactacggccgactgcaaggcctggacaaaaaacaaaccgccgaacaatacggcgacgagcaagtccgcatctggcggcgcagctacgacaccctgccgccgcttttggacaaagacgatgagttttccgcacacaaagaccgccgctatgcccatctgcctgccgatgttatccccgacggcgaaaacctgcaagtaacgctggagcgcgtattgccgttttgggaagaccaaatcgcccccgcgattttgagcggcaaacgcgtcttggtggcggcgcacggcaactccctgcgcgcgctggcaaaacacatcgagggcatttccgacgaagacatcatgggcttggaaatcccgaccggtcagccgttggtgtacaaattggacgacaatttgaaagtcatcgaaaaattctacctgtaa

SEQ ID NO: 6509 - protein, 227 aa, Neisseria meningitidis serogroup A
MELVFIRHGQSEWNAKNLFTGWRDVKLSEQGLAEAAAAGKKLKENGYEFDIAFTSVLTRAIKTCNIVLEESDQLFVPQIKTWRLNERHYGRLQGLDKKQTAEQYGDEQVRIWRRSYDTLPPLLDKDDEFSAHKDRRYAHLPADVIPDGENLQVTLERVLPFWEDQIAPAILSGKRVLVAAHGNSLRALAKHIEGISDEDIMGLEIPTGQPLVYKLDDNLKVIEKFYL

SEQ ID NO: 6510 - DNA, 684 bp, Neisseria meningitidis serogroup B
  CDS (1)..(684): transl_table=11
atggaactggtatttatccgccacggacaaagcgaatggaacgcgaaaaacctgtttacaggctggcgcgacgtgaagctgagcgagcaggggcttgccgaggctgccgccgccggcaagaaactgaaagaaaacggctatgagttcgacatcgccttcacatccgtcctgacccgcgcgattaagacctgcaacatcgttttggaagaatccgaccaactgttcgtaccgcaaatcaaaacgtggcggctgaacgaacgccactacggccaactgcaaggcctggacaaaaaacaaaccgccgaacaatacggcgacgagcaagtccgcatctggcggcgcagctacgacaccctgccgccgcttttggacaaagacgatgagttttccgcacacaaagaccgccgctatgcccatctgcctgccgatgtcgtacccgacggcgaaaacctgaaagtaacgctggagcgcgtattgccgttttgggaagaccaaatcgcccccgcgattttgagcggcaaacgcgtcttggtggcggcgcacggcaactccctgcgcgcgctggcaaaacacatcgagggcatttccgacgaagacattatgggcttggaaatcccgaccggtcagccgttggtgtacaaattggacgacaatttgaaagtcatcgaaaaattctacctgtaa

SEQ ID NO: 6511 - protein, 227 aa, Neisseria meningitidis serogroup B
MELVFIRHGQSEWNAKNLFTGWRDVKLSEQGLAEAAAAGKKLKENGYEFDIAFTSVLTRAIKTCNIVLEESDQLFVPQIKTWRLNERHYGQLQGLDKKQTAEQYGDEQVRIWRRSYDTLPPLLDKDDEFSAHKDRRYAHLPADVVPDGENLKVTLERVLPFWEDQIAPAILSGKRVLVAAHGNSLRALAKHIEGISDEDIMGLEIPTGQPLVYKLDDNLKVIEKFYL

SEQ ID NO: 6512 - DNA, 681 bp, Parachlamydia sp
  CDS (1)..(681): transl_table=11
atggttaaattaattttgatgcgtcacggccaatctcagtggaatttagcaaatttgtttactggttgggtagacattcccctgtcttttaaaggaattgaagaggctatagaggcaggaaaacaaatcaaaaattaccctattgatttaatttttacttcttccttaattcgtgctcaaatgacagcaatgttggcaatgtctgttcatacatctggtaaagtccctgtgattcttcacacaggtgaggggcgactagaagaatgggcaagtatttatagttccgaatctcaatctcagacaatacctgtcattcgtgcttgggaattgaatgagcggatgtatggagaattacaaggaataaataaagaagaaatggctaaaaaatatggagctgagcaggtgcatatttggcgacgaagttttgatgttccccctccaaatggagaaagtttacaaatgacagcagctcggaccataccttattttgaaaacaccattgtccctcatttgaaagagaagaaaaatatttttattgctgcacacggaaattccctgcgttcgattatcatgaaattagatgggctgacaacagatcaagtcgttaagttggaactggcaacaggggtgcctgtgatctatgatttcaatcacgatgaatatattaaacaacaaaagtag

SEQ ID NO: 6513 - protein, 226 aa, Parachlamydia sp
MVKLILMRHGQSQWNLANLFTGWVDIPLSFKGIEEAIEAGKQIKNYPIDLIFTSSLIRAQMTAMLAMSVHTSGKVPVILHTGEGRLEEWASIYSSESQSQTIPVIRAWELNERMYGELQGINKEEMAKKYGAEQVHIWRRSFDVPPPNGESLQMTAARTIPYFENTIVPHLKEKKNIFIAAHGNSLRSIIMKLDGLTTDQVVKLELATGVPVIYDFNHDEYIKQQK

SEQ ID NO: 6514 - DNA, 684 bp, Pasteurella multocida
  CDS (1)..(684): transl_table=11
atggaattggtctttattcgccacggtttcagtgagtggaatgccaaaaacctattcacaggttggcgtgatgtcaacttaacagaacgcggtatcgaagaagcaaaatcagcaggcaaaaaattactcgaagccggttttgaatttgatattgctttcacgtctgttttaacgcgtgcaattaaaacctgtaacattgtgttagaagaatctaaccaactttggatcccacaagtgaaaaactggcgtttaaatgagcgtcattacggtgcattacaaggcttagataaaaaagccactgcagaacaatatggtgatgagcaagtccatatttggcgtcgttcttacgatatttctcctccagatttagatccacaagatcctcattctgcccataacgaccgtcgttatgctcacttaccaagcgatgtggtacctgatgcagaaaacttaaaaatcacccttgagcgtgttttacctttctgggaagaccaaattgccccagctttactggcgggtaaacgtgtccttgtgacagcacacggcaactcattacgtgcattggcaaaacacattgaaggcatttctgatgcagacatcatggatttagaaatcccaaccggtcagccattagtgtacaaattagatgacaatttaaaagtcgtggaaaaatactacctttaa

SEQ ID NO: 6515 - protein, 227 aa, Pasteurella multocida
MELVFIRHGFSEWNAKNLFTGWRDVNLTERGIEEAKSAGKKLLEAGFEFDIAFTSVLTRAIKTCNIVLEESNQLWIPQVKNWRLNERHYGALQGLDKKATAEQYGDEQVHIWRRSYDISPPDLDPQDPHSAHNDRRYAHLPSDVVPDAENLKITLERVLPFWEDQIAPALLAGKRVLVTAHGNSLRALAKHIEGISDADIMDLEIPTGQPLVYKLDDNLKVVEKYYL

SEQ ID NO: 6516 - DNA, 753 bp, Photorhabdus luminescens subsp
  CDS (1)..(753): transl_table=11
atggctgtcactaaactggttctggtaagacatggcgaaagcgagtggaacagagagaaccgtttcactggctggactgacgtcgcgttatctgaaaaaggtcgcgccgaagctcaacaagcagggcaactgttgaaagaagaaggttttgtttttgattttgcctacacctccgtgctaaaacgcgctatccatacgctgtggaacattctggatcaggttgatcaacagtggttacctgttgaaaaaagctggaaactaaatgaacgtcattatggcgctctgcaaggtttggacaaagcagaaaccgcagctaaatacggtgatgatcaggttaaactgtggcgtcgtggttttgctatcaccccaccagatttaactaaagatgatgaacgtttcccaggccatgatccgcgttatgcaaatttgaagccagaagagttacccgtgactgaaagcctggcaacaacgattgaacgcgtgatcccttactgggaagaagtgatcaaaccgcgcgttgctcaaggtgagaaagtgattatcgcagcgcacggtaattctttgcgtgctttggttaaatatctggataatatgagcgaagaaaccattcttgagctgaatatcccaacagcagtacctttggtttatgaattcgacgaaaacatgaaaccaatcaaacattactatctgggtaacgctgatgaaatcgcagcaaaagccgcggcggtagcaaaccaaggtaaggcaaaataa

SEQ ID NO: 6517 - protein, 250 aa, Photorhabdus luminescens subsp
MAVTKLVLVRHGESEWNRENRFTGWTDVALSEKGRAEAQQAGQLLKEEGFVFDFAYTSVLKRAIHTLWNILDQVDQQWLPVEKSWKLNERHYGALQGLDKAETAAKYGDDQVKLWRRGFAITPPDLTKDDERFPGHDPRYANLKPEELPVTESLATTIERVIPYWEEVIKPRVAQGEKVIIAAHGNSLRALVKYLDNMSEETILELNIPTAVPLVYEFDENMKPIKHYYLGNADEIAAKAAAVANQGKAK

SEQ ID NO: 6518 - DNA, 747 bp, Porphyromonas gingivalis
  CDS (1)..(747): transl_table=11
atgaaaagaatagtattgattcgccacggcgaaagcttgtggaacaaggaaaatcgctttacgggatggacagatgtggatttgtccgaaaaaggtattgaagaagccaagaaagccggcgagctcatgaagaaagaaggctttcagtttaccaaagcctatacttcctatctcaaacgtgccgtcaagaccctgaacggtgtcctcgatgtaatggacttggattggataccggtggagaagacctggcgtctgaacgagaagcactacggcatgctgcaaggcctcaacaaggccgagactgccgagaagtacggagacgaacaggtactcatctggcgtcgcagctacgacgtcccccccacgcctatggagaaagaggatccgcgctctccgttcatggatccgcgctacaaaggtgtgtgcgagaaagacctgccactgacagaagctctctgcgacacggtaaatcgtatcctcccctattggaacgagaccatattccccacgctcaaggagcatgacgaggtattggtagcagctcacggcaacagtctgcgtggtatcatcaaggtgctgaaaaacatttcggacgaagacatcatcagcctgaacctcccgacagccgtgccttacgtttttgaatttgacgacaatctccgtctggtgaaggactatttcctcggcgatccagaagagatcaaaaagctgatggaggcagtagccaatcagggcaagaagaaataa

SEQ ID NO: 6519 - protein, 248 aa, Porphyromonas gingivalis
MKRIVLIRHGESLWNKENRFTGWTDVDLSEKGIEEAKKAGELMKKEGFQFTKAYTSYLKRAVKTLNGVLDVMDLDWIPVEKTWRLNEKHYGMLQGLNKAETAEKYGDEQVLIWRRSYDVPPTPMEKEDPRSPFMDPRYKGVCEKDLPLTEALCDTVNRILPYWNETIFPTLKEHDEVLVAAHGNSLRGIIKVLKNISDEDIISLNLPTAVPYVFEFDDNLRLVKDYFLGDPEEIKKLMEAVANQGKKK

SEQ ID NO: 6520 - DNA, 747 bp, Ralstonia solanacearum
  CDS (1)..(747)
atgcacaagctcgtcctcatccgccacggcgaatcgacgtggaacctcgaaaaccgcttcaccggctgggtcgacgtcgacctgaccgacaccggcatcgcccaggcccgccagggcggccgcctgctgcgcgaagccggcttcaccttcgacctggcctacacctcggtgctcaagcgcgccatccgcacactgtggcacgtgcaggatgaaatggacctgatgtggatcccgacccgcaccgaatggcgcctgaacgagcgccactatggcggcctgtcgggtctgaacaaggccgagaccgccgcccagtacggcgaccagcaggtgctggtctggcgccgcagctacgacacgccgccgcccgcgctggaagccggcgacgagcgcgacgcgtatggcaacccgcgctatgcgggcctgccgcgcgaacaggtgccgctcaccgaatgcctgaaggacaccgtggcgcgcgtgctgccgctgtgggaaacgtcgatcgccccggacatcaagagcggcaagcgcgtcgtgatcgccgcgcacggcaacagcatccgcgccctggtgaagtacctcgacaacatctcggacgacgacatcgtcggcctgaacatccccaacggcacgccgctcgtctacgaactggacgccaacctgaagcccatccgccattactatctcggcgaccaggaagcgatcgccgcgtcgctcgccgccgtggctggccagggcaaggcgaaataa

SEQ ID NO: 6521 - protein, 248 aa, Ralstonia solanacearum
MHKLVLIRHGESTWNLENRFTGWVDVDLTDTGIAQARQGGRLLREAGFTFDLAYTSVLKRAIRTLWHVQDEMDLMWIPTRTEWRLNERHYGGLSGLNKAETAAQYGDQQVLVWRRSYDTPPPALEAGDERDAYGNPRYAGLPREQVPLTECLKDTVARVLPLWETSIAPDIKSGKRVVIAAHGNSIRALVKYLDNISDDDIVGLNIPNGTPLVYELDANLKPIRHYYLGDQEAIAASLAAVAGQGKAK

SEQ ID NO: 6522 - DNA, 621 bp, Rhizobium loti
  CDS (1)..(621): transl_table=11
atgtcgagaacccttgtgctcgtgcgccatggccagagcgaatggaatttgaaaaacctgttcaccggttggcgtgacgttgacctgaccgagcagggtcatgccgaggccaaggccgccgggcagaaactcaaggcgcgcggcctgaagttcgacatcgccttcacctcggcgctgagccgcgcgcaaaagacctgccagcatattctcgacgccgtcggccagagcgatctcaagaccatccgcgaccaggcactcaacgagcgcgactatggcgacctttccggcctcaacaaggacgacgcccgcaagaaatggggcgaggagcaggtgcatgtctggcgccgctcctacgacgtgtcgccgcccggcggcgaaagcctgaaggacaccggcgcccgcgtctggccttactacctgcacgacctgcagccgcacgtgctgcgcggcggcaccgtgctggtcgccgcccacggcaattcgctgcgcgcgctgatcatggcgctggacggcaagtcgggcgaggagatcgtcaagctggagctcggcaccggcgtgccggtcatctaccagctcaacgccgattcgaccgtggcgtcgaaggaagtgctggagggctga

SEQ ID NO: 6523 - protein, 206 aa, Rhizobium loti
MSRTLVLVRHGQSEWNLKNLFTGWRDVDLTEQGHAEAKAAGQKLKARGLKFDIAFTSALSRAQKTCQHILDAVGQSDLKTIRDQALNERDYGDLSGLNKDDARKKWGEEQVHVWRRSYDVSPPGGESLKDTGARVWPYYLHDLQPHVLRGGTVLVAAHGNSLRALIMALDGKSGEEIVKLELGTGVPVIYQLNADSTVASKEVLEG

SEQ ID NO: 6524 - DNA, 636 bp, Rhizobium meliloti
  CDS (1)..(636): transl_table=11
atgagcggcaccctcgtccttgtccggcacggccagagcgactggaacctgaagaacctcttcaccggctggcgcgatcccgacctcaccgaactcggcatcgaggaggcaaaggccggcggcaaggcgcttgccgattacggcatcaaattcgacatcgccttcacctccgtcctcatccgggcccagcgtacctgccagctcgtcctcgacgccgtcggccagtcgtcgctcgaaacgatccgcgatcaggccctgaacgagcgcgactacggcgacctctccggtctcaacaaggacgatgcgcgggcgaaatggggcgaagagcaggtccatatctggcgccgctcctacgacgtgccgccgcccggcggcgagagcctgcgcgacaccggcgcgcgcgtctggccctattacctgaccgacatcctgccgcgcgtgctttcgggcgagaaggtgctcgtcgccgcccatggcaactcgctgcgctccctcgtcatggtgctggacaagctgaccaaggagcagatcctcaagctcaacctcgcgaccggagtgccgatggtctacaagctgaacgcggattcgaccgtcgcttcgaaggaagtgctaggggatatgtccggggcgcattga

SEQ ID NO: 6525 - protein, 211 aa, Rhizobium meliloti
MSGTLVLVRHGQSDWNLKNLFTGWRDPDLTELGIEEAKAGGKALADYGIKFDIAFTSVLIRAQRTCQLVLDAVGQSSLETIRDQALNERDYGDLSGLNKDDARAKWGEEQVHIWRRSYDVPPPGGESLRDTGARVWPYYLTDILPRVLSGEKVLVAAHGNSLRSLVMVLDKLTKEQILKLNLATGVPMVYKLNADSTVASKEVLGDMSGAH

SEQ ID NO: 6526 - DNA, 753 bp, Salmonella typhi; identical to SEQ ID NO: 6332
  CDS (1)..(753)

SEQ ID NO: 6527 - protein, 250 aa, Salmonella typhi; identical to SEQ ID NO: 6333

SEQ ID NO: 6528 - DNA, 753 bp, Salmonella typhimurium; identical to SEQ ID NO: 6250
  CDS (1)..(753)

SEQ ID NO: 6529 - protein, 250 aa, Salmonella typhimurium; identical to SEQ ID NO: 6251

SEQ ID NO: 6530 - DNA, 687 bp, Staphylococcus aureus
  CDS (1)..(687): transl_table=11
atgccaaaattaattttatgtcgtcatggacaaagcgagtggaatgctaaaaacttatttactggatgggaagatgttaatttatctgaacaaggtattaatgaagcgactagagcaggtgaaaaagtaagagaaaataacattgccatcgatgtagcttttacatcgttattaacacgtgctttagatacaacgcattatattttaactgaatctaaacaacaatggattcctgtatataaaagctggcgtttaaatgaacgccactatggtggattgcaaggcttaaataaagatgatgctagaaaagaatttggagaagaacaagtacatatttggcgtcgttcttatgatgtgaaaccacctgctgaaaccgaagaacaacgtgaagcttacttagctgatcgtcgatataatcatttagataaacgtatgatgccttattctgaaagtctgaaagatactttagttcgagtgataccattttggacagatcatatttcacaatatttgctagatggtcaaacggtattagtttctgcacacggaaattcaattcgcgcattaattaaatatcttgaagatgtgtcagatgaagatatcattaattatgaaattaaaacaggtgcaccgcttgtttatgaattaacggatgatttagaagttatagataaatactacttataa

SEQ ID NO: 6531 - protein, 228 aa, Staphylococcus aureus
MPKLILCRHGQSEWNAKNLFTGWEDVNLSEQGINEATRAGEKVRENNIAIDVAFTSLLTRALDTTHYILTESKQQWIPVYKSWRLNERHYGGLQGLNKDDARKEFGEEQVHIWRRSYDVKPPAETEEQREAYLADRRYNHLDKRMMPYSESLKDTLVRVIPFWTDHISQYLLDGQTVLVSAHGNSIRALIKYLEDVSDEDIINYEIKTGAPLVYELTDDLEVIDKYYL

SEQ ID NO: 6532 - DNA, 687 bp, Staphylococcus epidermidis
  CDS (1)..(687): transl_table=11
atgccaaaattaatactatgtcggcacggacaaagtgaatggaatgcgaaaaatttatttacaggttgggccgatgtcaaactatcaaaacaaggaattgaagaggcgcaatcagcaggtaaaaaaatttacgacaatcaaattgaaattgatattgcgtttacctctttactcactagagctttagaaacaacacaatatattttagcaggttctgaccaacagtggattcctgtttataaaagttggcgtttaaatgaacgacattatggtggtttacaaggtttaaataaagatgatgcgagaaaaaaatggggggaagatcaggtgcatcaatggagacgctcatatgatgtacgtccgcctagagaaagtgaagaacaacgagaagcatatttaaaaaatcgtcgttatcaacatattgatcaccgtatgatgccttattgtgaaagtttgaaagatacattagaacgagttgttccgttctggactgatcatatttcacaacacctattagatgataaaactgtacttgtttcggcccacggaaattccattcgcgcattaattaagtatttggaaggtttatcagaagaagatatcgtcggatatgaaattaaaacgggtgcaccgctagtatatgaactcacagatgatttagttgttaaggataaatattatttataa

SEQ ID NO: 6533 - protein, 228 aa, Staphylococcus epidermidis
MPKLILCRHGQSEWNAKNLFTGWADVKLSKQGIEEAQSAGKKIYDNQIEIDIAFTSLLTRALETTQYILAGSDQQWIPVYKSWRLNERHYGGLQGLNKDDARKKWGEDQVHQWRRSYDVRPPRESEEQREAYLKNRRYQHIDHRMMPYCESLKDTLERVVPFWTDHISQHLLDDKTVLVSAHGNSIRALIKYLEGLSEEDIVGYEIKTGAPLVYELTDDLVVKDKYYL

SEQ ID NO: 6534 - DNA, 693 bp, Streptococcus agalactiae serotype III
  CDS (1)..(693): transl_table=11
atggtaaaattagtattcgcacgccacggtgaatctgagtggaataaagctaaccttttcactggatgggctgacgtagatctttcagaaaaaggtacacaacaagctattgatgctgggaaattaattcaagcagcaggtattgagttcgaccttgcttttacatcagttcttaaacgtgccatcaaaacaactaaccttgcccttgaagcagctgatcaactttgggtaccagttgaaaaatcatggcgcttgaacgaacgtcattacggtggattgacaggaaaaaataaagcagaagcagctgaacaatttggtgatgagcaagttcatatttggcgtcgttcatatgatgtattgcctccagatatggctaaagatgatgaacattcagcacatactgatcgtcgctatgcttcactagatgattctgttattccagatgcagaaaacctaaaagttactttagagcgtgctcttcctttctgggaagataaaattgctcctgctcttaaagatggtaaaaatgtgtttgttggtgcacacggtaactcaatccgtgctcttgtaaaacatatcaaacaattgtcagatgatgaaatcatggacgttgaaattcctaacttcccaccacttgttttcgaatttgatgaaaaattaaaccttgtttcagaatattacttaggtaaataa

SEQ ID NO: 6535 - protein, 230 aa, Streptococcus agalactiae serotype III
MVKLVFARHGESEWNKANLFTGWADVDLSEKGTQQAIDAGKLIQAAGIEFDLAFTSVLKRAIKTTNLALEAADQLWVPVEKSWRLNERHYGGLTGKNKAEAAEQFGDEQVHIWRRSYDVLPPDMAKDDEHSAHTDRRYASLDDSVIPDAENLKVTLERALPFWEDKIAPALKDGKNVFVGAHGNSIRALVKHIKQLSDDEIMDVEIPNFPPLVFEFDEKLNLVSEYYLGK

SEQ ID NO: 6536 - DNA, 762 bp, Streptomyces avermitilis
  CDS (1)..(762): transl_table=11
atggccgacgcaccgtacaagctgatcctcctccgccacggcgagagcgaatggaacgcgaagaacctgttcaccggctgggtggacgtcaacctcaacgagaagggcgagaaggaggctgtccgcggcggtgagctgctgaaggacgccggcctgctgcccgacgtggtccacacgtcgctccagaagcgcgcgatccgcaccgcccagctcgcgctggagtccgcggaccgccactggatcccggtccaccgctcgtggcgcctgaacgagcgtcactacggcgccctccagggcaaggacaaggcgcagacgctcgccgagttcggcgaggagcagttcatgctctggcgccgctcgtacgacaccccgcccccgcccctcgcggacggctccgagttctcccagtcggacgacccgcgctacgcctccatccccccggagctgcgccccaagacggagtgcctcaaggacgtcgtcaaccggatgctcccgtactggtacgacggcatcgtcccggacctgctgaccggccgcacggtcctggtcgcggcccacggcaacagcctccgcgccctggtcaagcacctcgacggcatctccgacgaggacatcgcgggcctgaacatcccgacgggcatcccgctgtcctacgaactcgacacggacttcaagccgctcaacccgggcggcacctacctcgacccggacgcggcggcggcggcgatcgaggcggtcaagaaccagggcaagaagaagtaa

SEQ ID NO: 6537 - protein, 253 aa, Streptomyces avermitilis
MADAPYKLILLRHGESEWNAKNLFTGWVDVNLNEKGEKEAVRGGELLKDAGLLPDVVHTSLQKRAIRTAQLALESADRHWIPVHRSWRLNERHYGALQGKDKAQTLAEFGEEQFMLWRRSYDTPPPPLADGSEFSQSDDPRYASIPPELRPKTECLKDVVNRMLPYWYDGIVPDLLTGRTVLVAAHGNSLRALVKHLDGISDEDIAGLNIPTGIPLSYELDTDFKPLNPGGTYLDPDAAAAAIEAVKNQGKKK

SEQ ID NO: 6538 - DNA, 762 bp, Streptomyces coelicolor; identical to SEQ ID NO: 6260
  CDS (1)..(762)

SEQ ID NO: 6539 - protein, 253 aa, Streptomyces coelicolor; identical to SEQ ID NO: 6261

SEQ ID NO: 6540 - DNA, 693 bp, Streptococcus mutans
  CDS (1)..(693): transl_table=11
atggtaaaattagtatttgctcgtcatggtgaatcagaatggaacaaggctaacctttttactggctgggctgatgttgacctttcagaagaaggaacgcaacaagcaattgatgccggcaaactcattaaagaagcagacatcaaatttgaccttgctttcacatcagttttgacacgtgcaatcaagacaactaatttggcgcttgaatattctgatcaactttgggtaccagttgaaaagtcatggcgtttgaatgaacgtcactatggtggcttgactggtaaaaataaagctgaagctgcggaaaaatttggagacgaacaagttcacatttggcgtcgctcatatgatgtattgccgccagctatggccaaagacgatccatactcagcacacactgaccgtcgttatgcaaatcttgatgatactgttattccagatgcagaaaacttaaaagtcaccttagaacgtgctcttccatactgggaagataaaattgctccagctcttaaagatggaaaaaatgtatttgttggagcacatggtaactctatccgtgctcttgtaaaacatatcaaacaattgtcagatgatgacattatgggtgttgaaattccaaacttcccaccattagtttttgaatttgacgaaaatttaaatgtcactgctgaatactatcttggtaaataa

SEQ ID NO: 6541 - protein, 230 aa, Streptococcus mutans
MVKLVFARHGESEWNKANLFTGWADVDLSEEGTQQAIDAGKLIKEADIKFDLAFTSVLTRAIKTTNLALEYSDQLWVPVEKSWRLNERHYGGLTGKNKAEAAEKFGDEQVHIWRRSYDVLPPAMAKDDPYSAHTDRRYANLDDTVIPDAENLKVTLERALPYWEDKIAPALKDGKNVFVGAHGNSIRALVKHIKQLSDDDIMGVEIPNFPPLVFEFDENLNVTAEYYLGK

SEQ ID NO: 6542 - DNA, 696 bp, Streptococcus pyogenes serotype M1
  CDS (1)..(696): transl_table=11
atggtaaaattggttttcgctcgccacggtgagtcagaatggaacaaagctaacctcttcactggttgggcagatgttgatctttcagaaaaagggacacaacaagcgattgatgcaggtaaattgatcaaagaagcaggtattgaatttgaccttgctttcacttcagtattgacacgtgctatcaaaacaactaaccttgcccttgaaaatgcaggtcaattgtgggttccaactgaaaaatcatggcgcttgaacgagcgtcactatggtgctttgactggcaaaaacaaagctgaagctgcagaacaattttgtgatgaacaagttcatatctggcgtcgttcatacgacgtgttgccgccagctatggctaaagatgatgagtattcagcacacaaagaccgtcgttatgctgatcttgacccagcccttattccagatgctgaaaacttaaaagtcactcttgaacgcgcaatgccttactgggaagaaaaaattgctccagctcttcttgacggtaaaaacgtctttgttggcgcacatggtaactcaatccgcgctcttgtgaaacacattaaaggtctttcagatgacgaaatcatggatgtggaaattccaaacttcccaccacttgtttttgaattagatgaaaaacttaacattgttaaagaatactaccttggtggtgaataa

SEQ ID NO: 6543 - protein, 231 aa, Streptococcus pyogenes serotype M1
MVKLVFARHGESEWNKANLFTGWADVDLSEKGTQQAIDAGKLIKEAGIEFDLAFTSVLTRAIKTTNLALENAGQLWVPTEKSWRLNERHYGALTGKNKAEAAEQFCDEQVHIWRRSYDVLPPAMAKDDEYSAHKDRRYADLDPALIPDAENLKVTLERAMPYWEEKIAPALLDGKNVFVGAHGNSIRALVKHIKGLSDDEIMDVEIPNFPPLVFELDEKLNIVKEYYLGGE

SEQ ID NO: 6544 - DNA, 696 bp, Streptococcus pyogenes serotype M3
  CDS (1)..(696): transl_table=11
atggtaaaattggttttcgctcgccacggtgagtcagaatggaacaaagctaacctcttcactggttgggcagatgttgatctttcagaaaaagggacacaacaagcgattgatgcaggtaaattgatcaaagaagcaggtattgaatttgaccttgctttcacttcagtattgacacgtgctatcaaaacaactaaccttgcccttgaaaatgcaggtcaattgtgggttccaactgaaaaatcatggcgcttgaacgagcgtcactatggtgctttgactggcaaaaacaaagctgaagctgcagaacaatttggtgatgaacaagttcatatctggcgtcgttcatacgacgtgttgccgccagctatggctaaagatgatgagtattcagcacacaaagaccgtcgttatgctgatcttgacccagcccttattccagatgctgaaaacttaaaagtaactcttgaacgcgcaatgccttactgggaagaaaaaattgctccagctcttcttgatggtaaaaacgtctttgttggcgcacatggtaactcaatccgcgctcttgtgaaacacattaaaggtctttcagatgacgaaatcatggatgtggaaattccaaacttcccaccacttgtttttgaattagatgaaaaacttaacattgttaaagaatactaccttggtggtgaataa

SEQ ID NO: 6545 - protein, 231 aa, Streptococcus pyogenes serotype M3
MVKLVFARHGESEWNKANLFTGWADVDLSEKGTQQAIDAGKLIKEAGIEFDLAFTSVLTRAIKTTNLALENAGQLWVPTEKSWRLNERHYGALTGKNKAEAAEQFGDEQVHIWRRSYDVLPPAMAKDDEYSAHKDRRYADLDPALIPDAENLKVTLERAMPYWEEKIAPALLDGKNVFVGAHGNSIRALVKHIKGLSDDEIMDVEIPNFPPLVFELDEKLNIVKEYYLGGE

SEQ ID NO: 6546 - DNA, 693 bp, Streptococcus pneumoniae
  CDS (1)..(693): transl_table=11
atggtaaaattggtttttgctcgccacggtgagtctgaatggaacaaagctaaccttttcactggttgggctgatgttgatttgtctgaaaaaggtacacaacaagcgattgacgctggtaaattgatcaaagaagctggtatcgaatttgaccaagcttacacttcagtattgaaacgtgctatcaaaacaactaacttggctcttgaagcttctgaccaattgtgggttccagttgaaaaatcatggcgcttgaacgaacgtcactacggtggtttgactggtaaaaacaaagctgaagctgctgaacaatttggtgatgagcaagttcacatctggcgtcgttcatacgatgtattgcctccaaacatggaccgtgatgatgagcactcagctcacacagaccgtcgttacgcttcacttgacgactcagttatcccagatgctgaaaacttgaaagtgactttggaacgtgctcttccattctgggaagataaaatcgctccagctcttaaagatggtaaaaacgtattcgtaggagctcacggtaactcaatccgtgcccttgtaaaacacatcaaaggtttgtcagatgacgagatcatggacgtggaaatccctaacttcccaccattggtattcgaattcgacgaaaaattgaacgtcgtttctgaatactaccttggaaaataa

SEQ ID NO: 6547 - protein, 230 aa, Streptococcus pneumoniae
MVKLVFARHGESEWNKANLFTGWADVDLSEKGTQQAIDAGKLIKEAGIEFDQAYTSVLKRAIKTTNLALEASDQLWVPVEKSWRLNERHYGGLTGKNKAEAAEQFGDEQVHIWRRSYDVLPPNMDRDDEHSAHTDRRYASLDDSVIPDAENLKVTLERALPFWEDKIAPALKDGKNVFVGAHGNSIRALVKHIKGLSDDEIMDVEIPNFPPLVFEFDEKLNVVSEYYLGK

SEQ ID NO: 6548 - DNA, 693 bp, Streptococcus thermophilus
  CDS (1)..(693): transl_table=11
atggtaaaattggttttcgctcgccacggtgagtctgaatggaacaaagctaatcttttcacaggttgggctgacgtagatctttctgaaaaaggtactcaacaagctattgacgctggtaaattgattaaagaagctggtattgaatttgacaaagcttacacttcagtattgaaacgtgcgatcaaaacaactaaccttgcgcttgaagcctctgaccaactttgggttccagttgaaaaatcatggcgcttgaacgaacgtcactacggtggtttgactggtaaaaataaagcagaagctgctgaacaatttggtgatgagcaagttcacatctggcgtcgttcatacgatgtattgcctccaaaaatggaccgtgatgatgagtactcagcacacaaagaccgtcgttacgcttcacttgacgattcagtaattccagatgctgaaaacttgaaagtaactttggaacgtgcccttccattctgggaagataaaattgctccagctcttaaagatggtaaaaacgtattcgtaggtgcacatggtaactcaatccgtgcccttgtaaaacacatcaaaaaattgtcagatgacgaaatcatggatgttgaaattccaaacttcccaccattggtatttgaatttgacgaaaaattgaacgttgtttctgaatattacctcggaaaataa

SEQ ID NO: 6549 - protein, 230 aa, Streptococcus thermophilus
MVKLVFARHGESEWNKANLFTGWADVDLSEKGTQQAIDAGKLIKEAGIEFDKAYTSVLKRAIKTTNLALEASDQLWVPVEKSWRLNERHYGGLTGKNKAEAAEQFGDEQVHIWRRSYDVLPPKMDRDDEYSAHKDRRYASLDDSVIPDAENLKVTLERALPFWEDKIAPALKDGKNVFVGAHGNSIRALVKHIKKLSDDEIMDVEIPNFPPLVFEFDEKLNVVSEYYLGK

SEQ ID NO: 6550 - DNA, 750 bp, Thermoanaerobacter tengcongensis
  CDS (1)..(750): transl_table=11
atgtacaaagtagttttacttcgccatggagaaagcatatggaacatggaaaacaggttcacaggttggacagatgtagacctttcgccgaaaggaattgaagaggcaaagcaggcaggaaagattttgaaagagaagggatttacttttgatgcggcgtttacttcagttttgaagagggcaataaggactttgtggatagttttagatgagctggacctcatgtggataccagtttacaagtcctggcggttgaatgagaggcattatggagctcttcaggggcttaataaggcagaaaccgcaaaaaaatatggagaagagcaggtaaagctttggagaaggtctgcagaggttagacctcctgctttgactaaggatgacccgagatatcctggcaatgacccaaggtacgccgacctttctgaggatgaaattcctctcacagagaatttgatagacactataaatagagttattccctactgggagtccacaattgcaccgactataaagtctggcaagagagtgataatagcagctcatggaaacagtttaagaggccttgtgaagtatctggacaatctttctaatgaggaaataatggagctaaatattcctacaggtattcctctggtttatgagttagatgagaacttaaagcctataaggcactattatttagctgatgaagaggagctcaagaaaaaacagcaggaagttgcggagcagggcaaagcgagggcttaa

SEQ ID NO: 6551 - protein, 249 aa, Thermoanaerobacter tengcongensis
MYKVVLLRHGESIWNMENRFTGWTDVDLSPKGIEEAKQAGKILKEKGFTFDAAFTSVLKRAIRTLWIVLDELDLMWIPVYKSWRLNERHYGALQGLNKAETAKKYGEEQVKLWRRSAEVRPPALTKDDPRYPGNDPRYADLSEDEIPLTENLIDTINRVIPYWESTIAPTIKSGKRVIIAAHGNSLRGLVKYLDNLSNEEIMELNIPTGIPLVYELDENLKPIRHYYLADEEELKKKQQEVAEQGKARA

SEQ ID NO: 6552 - DNA, 744 bp, Treponema denticola
  CDS (1)..(744): transl_table=11
atgagattggttttggtaaggcatggtgaaagtgaatggaataagcttaatttatttaccggctggacggatgtcgatttaagcgaaaagggtgtagaagaagcaaaagaaggcggaacctatttaaaaaaagaaggttttgacttcgatatttgctatacatcctatctaaaacgagcaattcataccctcaattatattttaagccagatggatagagaatggcttcctgtcataaaaacttggaaacttaatgaaaggcattacgggggcttgcagggcctaaacaaggcggaaacagccgaaaaatacggagaagatcaggtaaaaatttggcgccgttcctttgatattgctcctcccgttttggaagaaggagataagcgctgcccctatttgcaggaacagtacaggggtattgaaaaatcagagctccccttaaccgaaagcttaaaagataccatagccagagccgttcctttttttgaaaagactataaaacctcaaatgctagaaggaaaaaggattcttatcacagcccacggtaattccctcagggccttggttaaatattttgaaaatttaagcgatgaagaaataatctcggtaaatattccgacaggcgttcctttggtttacgaattcgataagaattttaaggttcttagtaaacgctaccttggagatcaagagaaaatcaatgctaaaataaatgcagttgcaaatcaaggaaaaaagaaataa

SEQ ID NO: 6553 - protein, 247 aa, Treponema denticola
MRLVLVRHGESEWNKLNLFTGWTDVDLSEKGVEEAKEGGTYLKKEGFDFDICYTSYLKRAIHTLNYILSQMDREWLPVIKTWKLNERHYGGLQGLNKAETAEKYGEDQVKIWRRSFDIAPPVLEEGDKRCPYLQEQYRGIEKSELPLTESLKDTIARAVPFFEKTIKPQMLEGKRILITAHGNSLRALVKYFENLSDEEIISVNIPTGVPLVYEFDKNFKVLSKRYLGDQEKINAKINAVANQGKKK

SEQ ID NO: 6554 - DNA, 756 bp, Treponema pallidum
  CDS (1)..(756): transl_table=11
atgaagcttgtgttgatccgtcatggagaaagtgaatggaacaggctgaacctgttcactggttggacagatgttccgcttaccccacgtggggagtcggaagcccaggaaggaggccgcgtactgcaagaagcggggtttgattttgacctatgctacacttctttcttgaaacgtgccattcgtacgctcaattttgtactccaggcactggaccgtgagtggttgccggttcacaaaagctggaaattgaacgagcggcattatggggatctacaaggtttaaataagacagagacggcgcagaagtatggtgagcagcaggttagggtgtggcgtcgctcctttgatgtggctcctcctccgcttactgtaggggacgcacgttgtccgcatactcaagcctcctaccggggggtatgcgcgtctggtcggacgccagtacttccgtttacggaaagtttgaaagataccgttgcgcgtgtggtgccgtattttgaagaggaaatcaaaccgcagatgatttccggacagcgtgtgcttattgtggcgcatggtaactcgttgcgcgcactgatgaagcacatagagtctttggatgagactcagataatggaagtaaatttgcctaccggtgtaccgcttgtctatgagttcgaggcggattttaccctgtgtgggaagcgttttttaggtaatgaggcggatgttgcagcgagggcgcaggctgtggctgatcagggtaagagtaactaa

SEQ ID NO: 6555 - protein, 251 aa, Treponema pallidum
MKLVLIRHGESEWNRLNLFTGWTDVPLTPRGESEAQEGGRVLQEAGFDFDLCYTSFLKRAIRTLNFVLQALDREWLPVHKSWKLNERHYGDLQGLNKTETAQKYGEQQVRVWRRSFDVAPPPLTVGDARCPHTQASYRGVCASGRTPVLPFTESLKDTVARVVPYFEEEIKPQMISGQRVLIVAHGNSLRALMKHIESLDETQIMEVNLPTGVPLVYEFEADFTLCGKRFLGNEADVAARAQAVADQGKSN

SEQ ID NO: 6556 - DNA, 666 bp, Tropheryma whipplei
  CDS (1)..(666): transl_table=11
atggataatctagttttgctacgtcacgggaatagcctatggaatcaagagaatctttttactggctgggttgatgttcgcctgagtgaacttggcgagaaagaggcgaaaactgccgggcaactcttgcgtgaagccaacagataccctgatgtcttgttcacctctctgctaacccgttctattcaaacggctcatatagcactcatggagatcgatcgtgtttggctgccaacttttcgtagttggcgattgaacgagagacattacggaagcttacagggtaaaaataaagcccaggtactggaggagtttggtgaagagcagttcaattcctggcgccgtggttacgatacacccccgccaccgctgcacagccaagctgatgacccccgctatgaggagccaccacccctttcagagtcactgaaggacgtacagaatagacttctgccttattggcagggtgtgattcttccgcatcttgttgccggaaaggttgttcttgtggttgctcacggaaattctttgcgtgcccttgtgaaacacctcgagtgcatatcggatacagacgtgtgtcagctcaatattccgactggcataccccttgtgtattctattgacccttcgggttgtgcaacacatcccggtagatatttgccctag

SEQ ID NO: 6557 - protein, 221 aa, Tropheryma whipplei
MDNLVLLRHGNSLWNQENLFTGWVDVRLSELGEKEAKTAGQLLREANRYPDVLFTSLLTRSIQTAHIALMEIDRVWLPTFRSWRLNERHYGSLQGKNKAQVLEEFGEEQFNSWRRGYDTPPPPLHSQADDPRYEEPPPLSESLKDVQNRLLPYWQGVILPHLVAGKVVLVVAHGNSLRALVKHLECISDTDVCQLNIPTGIPLVYSIDPSGCATHPGRYLP

SEQ ID NO: 6558 - DNA, 705 bp, Wigglesworthia glossinidia brevipalpis
  CDS (1)..(705): transl_table=11
atgtctataattaaattagttctaatgcgacatggttctagtatttggaacgatcaagatcgttttactggatggacagatattgatttatctgaaaaaggaaagaatgaagtcaaatatgcagggaaaatgttgaaatcttttggttattcatttaattttgcatatacttctttgttaaaaagagcaatacatagtttatgggttattttaaaagaaataaatcaatcttggattccagtagaaaaatcttggagattaaatgaaagacattacggtgcattgcaaggatttagtaaatatgaaattgaaaagaaatatggaaagaatcaattaaatgaatggagaagaggattttctatttcacctccaaagataaatgaaaaggataattattttattttaaatgataaaagatatttaaatttaaaaacaaaaaaattacttcctttttcagaaagtctaaaatctacaattgatagaataatgccatattgggatggaaatatatttccaagattgcaaaataaagaaaaaataataatcgtagctcatggaaattcaattagagctataataaaaattttatgtaatcttaatgaaaaagaaattataaaaattaatatacctactggtatacctttaatatatgaatttgattataatatggtttttaaaaaaaaatattttctttttgatagataa

SEQ ID NO: 6559 - protein, 234 aa, Wigglesworthia glossinidia brevipalpis
MSIIKLVLMRHGSSIWNDQDRFTGWTDIDLSEKGKNEVKYAGKMLKSFGYSFNFAYTSLLKRAIHSLWVILKEINQSWIPVEKSWRLNERHYGALQGFSKYEIEKKYGKNQLNEWRRGFSISPPKINEKDNYFILNDKRYLNLKTKKLLPFSESLKSTIDRIMPYWDGNIFPRLQNKEKIIIVAHGNSIRAIIKILCNLNEKEIIKINIPTGIPLIYEFDYNMVFKKKYFLFDR

SEQ ID NO: 6560 - DNA, 750 bp, Xanthomonas axonopodis pv
  CDS (1)..(750): transl_table=11
gtgacccgcaaactcgtactgctgcgccatggccagagccaatggaatctggacaaccgtttcaccggctgggtggatgtggaactcaccgaccagggccgccaggaagctgtggcggccggcaggctgatgaaggacgaagggctgcagttcgatgtcgcccacacctcggtgctcaagcgcgccatccacacgctgcagggcgcgttgaaggaactcgaccaggactggttgccggtgtccaagagctggcgcctcaacgagcgccactacggtggcctgcaaggcctggacaaggccgaaaccgcggcaaagcacggcgaggagcaggtcaagatctggcgccgttcctacgacatcccgccgccggcgatggacgtcaacgacccgggccacccgtgccacgaccgtcgctacgccacgctggaccgcaatgcattgccaggcaccgagtcgctggcgaccacgctggtgcgcgtgttgccgtattggcacgacgcgattgcgccgcagttgaaggccgggcagaccgtgctggtgaccgcgcacggcaattcgctgcgcgcgctctacaagtacctcaacgatgtctccaatgagcagatcctggagctcaacatccccaccggcatcccgttgctgttcgagctggacgacagcctgcaggtgcgcagcttccgttacctgggcgacccggaggcggccaagcgcgcggccgaagcggtggccaatcagggcaaggcgaagtaa

SEQ ID NO: 6561 - protein, 249 aa, Xanthomonas axonopodis pv
MTRKLVLLRHGQSQWNLDNRFTGWVDVELTDQGRQEAVAAGRLMKDEGLQFDVAHTSVLKRAIHTLQGALKELDQDWLPVSKSWRLNERHYGGLQGLDKAETAAKHGEEQVKIWRRSYDIPPPAMDVNDPGHPCHDRRYATLDRNALPGTESLATTLVRVLPYWHDAIAPQLKAGQTVLVTAHGNSLRALYKYLNDVSNEQILELNIPTGIPLLFELDDSLQVRSFRYLGDPEAAKRAAEAVANQGKAK

SEQ ID NO: 6562 - DNA, 750 bp, Xanthomonas campestris pv
  CDS (1)..(750): transl_table=11
gtgacccgcaaactcgtactgctgcgccatggccagagccaatggaacctggacaaccgtttcaccggctgggtggacgtggatctcaccgagcagggccgccaggaagccgccgcggccggcaagctgatgaaggacgaagggctgcagttcgatgtggcgtacacctcggtgctcaagcgcgccatccacacgctgcagggcgcgctgaaggagctcgaccaggactggctgccggtgcacaagagctggcgcctcaatgagcgtcactacggtggcctgcagggcctggacaaggccgaaaccgcggccaagcacggcgaagagcaggtcaagatctggcgccgttcctacgacatcccgccgccggccatggacgtcaccgatccgggccatcccgggcatgaccgccgctatgccacgctggaccgcaatgcattgccgggcaccgagtcgctggcgaccacgctggtgcgcgtgttgccgtactggcacgacgcgatcgccccgcagttgaaggccggccagaccgtgctggtcaccgcgcacggcaactcgttgcgcgcgctgtacaagtacctcaacgacatctccaacgcgcagatcctggagctcaacattcccaccggcatcccgctgttgttcgagctggacgacaacctgcaggtgcaaagctaccgctacctgggcgacccggaagcggccaagcgcgccgccgaagccgtggccaaccagggcaaggccaagtaa

SEQ ID NO: 6563 - protein, 249 aa, Xanthomonas campestris pv
MTRKLVLLRHGQSQWNLDNRFTGWVDVDLTEQGRQEAAAAGKLMKDEGLQFDVAYTSVLKRAIHTLQGALKELDQDWLPVHKSWRLNERHYGGLQGLDKAETAAKHGEEQVKIWRRSYDIPPPAMDVTDPGHPGHDRRYATLDRNALPGTESLATTLVRVLPYWHDAIAPQLKAGQTVLVTAHGNSLRALYKYLNDISNAQILELNIPTGIPLLFELDDNLQVQSYRYLGDPEAAKRAAEAVANQGKAK

SEQ ID NO: 6564 - DNA, 750 bp, Xylella fastidiosa
  CDS (1)..(750): transl_table=11
atgactcgtaaacttgtattgctacgccatggacagagtcaatggaactcaatgaaccgttttactggctgggtggatatagggctgaccgaacaaggtcatcaagaagccactatggctggtcatctgatgaaagaagaaggactagagtttgatgtcgctcatacttctttacttaagcgggcgatccatacattacaagacgcacttaaagcattggaccaggactggttaccaatttataaaagctggcgtctcaatgagcgtcactacggtgctctacaaggccttgataaaatagataccgcagctaaacatggtgaagagcaagtcaatatttggcgccgctcctatgacatccaaccgccgccgattgatctagatgacccaagccatccaatgcgagaccgccgttacgctgctctggaccgcaaagtattacctgtgacggaatcgctgaaaaacacactcgaacgagtattaccgtactggaatgatgccatcgcaccacaactaaatgacaacaagacggtacttattagcgcccacggcaactcattgcgtgcgttgtacaagtaccttaatcaagaaagtgatgagaaaatcctaaatgtcaatatccctactggcattccacttctatttgaactgagcgatacactacaagtagtgagttaccgttaccttggtgatccagatgcagcacaacgcgcttccgaaatggtagcaaaccaaggtaaggcgaagtaa

SEQ ID NO: 6565 - protein, 249 aa, Xylella fastidiosa
MTRKLVLLRHGQSQWNSMNRFTGWVDIGLTEQGHQEATMAGHLMKEEGLEFDVAHTSLLKRAIHTLQDALKALDQDWLPIYKSWRLNERHYGALQGLDKIDTAAKHGEEQVNIWRRSYDIQPPPIDLDDPSHPMRDRRYAALDRKVLPVTESLKNTLERVLPYWNDAIAPQLNDNKTVLISAHGNSLRALYKYLNQESDEKILNVNIPTGIPLLFELSDTLQVVSYRYLGDPDAAQRASEMVANQGKAK

SEQ ID NO: 6566 - DNA, 750 bp, Xylella fastidiosa
  CDS (1)..(750): transl_table=11
atgactcgtaaacttgtattgctacgccatggacagagtcaatggaactcaatgaaccgttttactggctgggtggatatagggctgaccgaacaaggtcatcaagaagccactatggctggtcatctgatgaaaaaagaaggactagagtttgatgtcgctcatacttctttacttaagcgggcgatccatacattacaagacgcacttaaagcattggaccaggactggttaccaatttataaaagctggcgtctcaatgagcgtcactacggtgctctacaaggccttgataaaatagataccgcagctaaacatggtgaagagcaagtcaatatttggcgccgctcctatgacatccagccgccaccgattgatctagatgacccaagccatccaatgcgagaccgccgttacgccgctttggaccgcaaagtattacctgtgagggaatcgctgaaaaatacactcgaacgagtattaccgtactggaatgatgccatcgcaccacaactaaatgacaacaagacggtacttattagcgcccacggcaactcattgcgtgcgttgtacaagtaccttaataaagaaagtgatgagaaaatcctaaatgtcaatatccctactggcattccacttctatttgaactgagcgatacactacaagtagtgagttaccgttaccttggcgatccagatgcagcacaacgcgctgccgaaatggtagcaaaccaaggtaaggcgaagtaa

SEQ ID NO: 6567 - protein, 249 aa, Xylella fastidiosa
MTRKLVLLRHGQSQWNSMNRFTGWVDIGLTEQGHQEATMAGHLMKKEGLEFDVAHTSLLKRAIHTLQDALKALDQDWLPIYKSWRLNERHYGALQGLDKIDTAAKHGEEQVNIWRRSYDIQPPPIDLDDPSHPMRDRRYAALDRKVLPVRESLKNTLERVLPYWNDAIAPQLNDNKTVLISAHGNSLRALYKYLNKESDEKILNVNIPTGIPLLFELSDTLQVVSYRYLGDPDAAQRAAEMVANQGKAK

SEQ ID NO: 6568 - DNA, 753 bp, Yersinia pestis; identical to SEQ ID NO: 6308
  CDS (1)..(753)

SEQ ID NO: 6569 - protein, 250 aa, Yersinia pestis; identical to SEQ ID NO: 6309

SEQ ID NO: 6570 - DNA, 687 bp, Zymomonas mobilis
  CDS (1)..(687): transl_table=11
atgcccacgctcgttttgtcccgtcacggacagtccgaatggaaccttgaaaaccgtttcaccggttggtgggacgttaacctgactgaacagggtgttcaggaagcaacggccggtggtaaagctctggctgaaaagggttttgaattcgatatcgctttcaccagcgttctgacccgcgccatcaaaaccaccaatcttattctcgaagccggtaaaaccctttgggttccgaccgaaaaagattggcgtttgaatgaacgtcactatggtggtctgaccggtctgaacaaggctgaaaccgccgctaaacatggtgaagaacaggttcatatttggcgccgttcttatgacgttccgccgcccccgatggaaaaaggcagcaagttcgatctgtctggcgatcgtcgttatgatggtgtcaagattcctgaaacggaaagcctgaaagacaccgttgctcgcgtgctgccttattgggaagaacgcattgcccctgaactgaaggctggcaagcgcgtcctgatcggtgcgcatggtaactcattgcgcgctctcgttaagcatctgtcgaaattgtcggacgaagaaatcgtcaaattcgaattgcccaccggtcagccgttggtctacgaattgaatgatgatctgaccccgaaagatcgttacttccttaacgaacgttaa

SEQ ID NO: 6571 - protein, 228 aa, Zymomonas mobilis
MPTLVLSRHGQSEWNLENRFTGWWDVNLTEQGVQEATAGGKALAEKGFEFDIAFTSVLTRAIKTTNLILEAGKTLWVPTEKDWRLNERHYGGLTGLNKAETAAKHGEEQVHIWRRSYDVPPPPMEKGSKFDLSGDRRYDGVKIPETESLKDTVARVLPYWEERIAPELKAGKRVLIGAHGNSLRALVKHLSKLSDEEIVKFELPTGQPLVYELNDDLTPKDRYFLNER

SEQ ID NO: 6572 - DNA, 765 bp, Homo sapiens
  CDS (1)..(765)
atggccgcctacaaactggtgctgatccggcacggcgagagcgcatggaacctggagaaccgcttcagcggctggtacgacgccgacctgagcccggcgggccacgaggaggcgaagcgcggcgggcaggcgctacgagatgctggctatgagtttgacatctgcttcacctcagtgcagaagagagcgatccggaccctctggacagtgctagatgccattgatcagatgtggctgccagtggtgaggacttggcgcctcaatgagcggcactatgggggtctaaccggtctcaataaagcagaaactgctgcaaagcatggtgaggcccaggtgaagatctggaggcgctcctatgatgtcccaccacctccgatggagcccgaccatcctttctacagcaacatcagtaaggatcgtaggtatgcagacctcacagaagatcagctaccctcctgtgagagtctgaaggatactattgccagagctctgcccttctggaatgaagaaatagttccccagatcaaggaggggaaacgtgtactgattgcagcccatggcaacagcctccggggcattgtcaagcatctggagggtctctctgaagaggctatcatggagctgaacctgccgactggtattcccattgtctatgaattggacaagaacttgaagcctatcaagcccatgcagtttctgggggatgaagagacggtgcgcaaagccatggaagctgtggctgcccagggcaaggccaagaagtga

SEQ ID NO: 6573 - protein, 254 aa, Homo sapiens; identical to SEQ ID NO: 6231

SEQ ID NO: 6574 - DNA, 765 bp, Mus musculus
  CDS (1)..(765)
atggctgcctacaagctggtgctgatccggcatggcgagagcgcctggaacctggagaaccgcttcagcggctggtacgacgccgacctgagcccggcgggccacgaggaggcgaagcgcggcgggcaggcgttgcgagatgctggctatgaatttgacatctgcttcacctctgtgcagaagagagcaatccggaccctctggacagtcctggatgccattgaccagatgtggttgccagtggtcaggacttggcgcctcaatgagcgacactatggtggtctgacaggtctcaacaaagcagaaactgctgctaagcatggtgaggcccaggtaaagatctggagacgatcttatgatgtcccaccgcctcccatggagcctgatcaccccttctacagcaacatcagcaaggatcgcaggtacgcagaccttactgaagaccagctcccctcgtgtgagagcctgaaggacactattgccagagcactgcccttctggaatgaagaaattgtcccccagatcaaagaggggaaaagggtcttgattgccgcccacggcaacagccttcggggcatcgttaagcatctggagggtctctcagaagaggccatcatggagctgaacctgcccacaggcatccctatcgtctatgaactggacaagaacttgaagcccatcaagcccatgcagttcctgggagacgaggagaccgtgcgcaaagccatggaagctgtggctgctcagggcaaggtgaagaagtga

SEQ ID NO: 6575 - protein, 254 aa, Mus musculus
MAAYKLVLIRHGESAWNLENRFSGWYDADLSPAGHEEAKRGGQALRDAGYEFDICFTSVQKRAIRTLWTVLDAIDQMWLPVVRTWRLNERHYGGLTGLNKAETAAKHGEAQVKIWRRSYDVPPPPMEPDHPFYSNISKDRRYADLTEDQLPSCESLKDTIARALPFWNEEIVPQIKEGKRVLIAAHGNSLRGIVKHLEGLSEEAIMELNLPTGIPIVYELDKNLKPIKPMQFLGDEETVRKAMEAVAAQGKVKK

SEQ ID NO: 6576 - DNA, 765 bp, Rattus norvegicus; identical to SEQ ID NO: 6248
  CDS (1)..(765)

SEQ ID NO: 6577 - protein, 254 aa, Rattus norvegicus; identical to SEQ ID NO: 6249

SEQ ID NO: 6578 - DNA, 762 bp, Homo sapiens; identical to SEQ ID NO: 6214
  CDS (1)..(762)

SEQ ID NO: 6579 - protein, 253 aa, Homo sapiens; identical to SEQ ID NO: 6215

SEQ ID NO: 6580 - DNA, 798 bp, Rattus norvegicus
  CDS (18)..(779)
cgcgtcccctgcccaccatggccacccaccgcctagtaatggtccgccacggtgagagctcatggaaccaagagaaccgtttctgtggctggtttgatgcagaactgagtgagaagggggcagaggaggccaagcggggggccactgccatcaaagatgccaagatagagtttgacatctgctacacgtcggtgctgaagcgggctatccgcaccctttggaccatcctggatgttacggaccaaatgtgggtgcccgtggtgcgcacctggcgcctcaatgagcggcactatggaggtctcacgggcctcaataaggctgagacggctgcaaagcatggggaggagcaggtgaagatctggaggcgttcctttgacaccccgccaccacctatggacgagaaacacaactactacgcctccatcagcaaggatcggcgctatgcaggcttgaagcctgaggagctgcctacctgtgagagcctcaaggacaccattgcccgggctctgcccttctggaatgaggagatcgcacctaagattaaggctggcaagagagtccttattgcagcccatgggaacagccttcgaggcattgtcaagcatctggaagggatgtcagaccaggccatcatggaactgaatctgcccaccggaatccccattgtctatgagctgaaccaggagctgaagcccaccaagcccatgaggttcctgggagacgaagagacagttcggaaggccatggaggctgtggctgcccagggaaaggcaaagtgagagtgggtgggcggaattc

SEQ ID NO: 6581 - protein, 253 aa, Rattus norvegicus; identical to SEQ ID NO: 6237

SEQ ID NO: 6582 - DNA, 765 bp, Homo sapiens
  CDS (1)..(765)
atggccgcctacaaactggtgctgatccggcacggcgagagcacatggaacctggagaaccgcttcagctgctggtacgacgccgatctgagcccggcgggccacgaggaggcgaagcgcggcgggcaggcgctacgagatgctggctatgagtttgacatctgcctcacctcagtgcagaagagagtgatccggaccctctggacagtgctagatgccattgatcagatgtggctgccagtggtgaggacttggcgcctcaatgagcggcactatgggggtctaaccggtctcaataaagcagaaactgctgcaaagcatggtgaggcccaggtgaagatctggaggcgctcctatgatgtcccaccacctccgatggagcccgaccatcctttctacagcaacatcagtaaggatcgcaggtatgcagacctcacagaagatcagctaccctcctatgagagtccgaaggatactattgccagagctctgcccttctggaatgaagaaatagttccccagatcaaggaggggaaacgtgtactgattgcagcccatggcaacagcctccagggcattgccaagcatgtggagggtctctctgaagaggctatcatggagctgaacctgccgactggtattcccatcgtctatgaattggacaagaacttgaagcctatcaagcccatgcagtttctgggggatgaagagacggtgtgcaaagccatagaagctgtggctgcccagggcaaggccaagaagtga

SEQ ID NO: 6583 - protein, 254 aa, Homo sapiens
MAAYKLVLIRHGESTWNLENRFSCWYDADLSPAGHEEAKRGGQALRDAGYEFDICLTSVQKRVIRTLWTVLDAIDQMWLPVVRTWRLNERHYGGLTGLNKAETAAKHGEAQVKIWRRSYDVPPPPMEPDHPFYSNISKDRRYADLTEDQLPSYESPKDTIARALPFWNEEIVPQIKEGKRVLIAAHGNSLQGIAKHVEGLSEEAIMELNLPTGIPIVYELDKNLKPIKPMQFLGDEETVCKAIEAVAAQGKAKK

SEQ ID NO: 6584 - DNA, 765 bp, Pan troglodytes
  CDS (1)..(765)
atggccgcctacaaactggtgctgatccggcacggcgagagcacatggaacctggagaaccgcttcagctgctggtacgacgccgacctgagcccggcgggccacgaggaggcgaagcgcggcgggcaggcgctacgagatgctggctatgagtttgacatctgcctcacctcagtgcagaagagagtgatccggaccctctggacagtgctagatgccattgatcagatgtggctgccagtggtgaggacttggcgcctcaatgagcggcactatgggggtctaaccgctctcaataaagcagaaactgctgcaaagcatggtgaggcccaggtgaagatctggaggcgctcctatgatgtcccaccacctccgatggagcccgaccaccctttctacagcaacatcagtaaggatcgcaggtatgcagacctcacagaagatcagctaccctcctatgagagtccgaaggatactattgccagagctctgcccttctggaatgaagaaatagttccccagatcaaggaggggaaacgtgtactgattgcagcccatggcaacagcctccagggcattgccaagcatgtggagggtctctctgaagaggctatcatggagctgaacctgccgactggtattcccattgtctatgaattggacaagaacttgaagcctatcaagcccatgcagtttctgggggatgaagagacggtgtgcaaagccatggaagctgtggctgcccagggcaaggccaagaagtga

SEQ ID NO: 6585 - protein, 254 aa, Pan troglodytes
MAAYKLVLIRHGESTWNLENRFSCWYDADLSPAGHEEAKRGGQALRDAGYEFDICLTSVQKRVIRTLWTVLDAIDQMWLPVVRTWRLNERHYGGLTALNKAETAAKHGEAQVKIWRRSYDVPPPPMEPDHPFYSNISKDRRYADLTEDQLPSYESPKDTIARALPFWNEEIVPQIKEGKRVLIAAHGNSLQGIAKHVEGLSEEAIMELNLPTGIPIVYELDKNLKPIKPMQFLGDEETVCKAMEAVAAQGKAKK

SEQ ID NO: 6586 - DNA, 744 bp, Saccharomyces cerevisiae
  CDS (1)..(744)
atgccaaagttagttttagttagacacggtcaatccgaatggaacgaaaagaacttattcaccggttgggttgatgttaaattgtctgccaagggtcaacaagaagccgctagagccggtgaattgttgaaggaaaagaaggtctacccagacgtcttgtacacttccaagttgtccagagctatccaaactgctaacattgctttggaaaaggctgacagattatggattccagtcaacagatcctggagattgaacgaaagacattacggtgacttacaaggtaaggacaaggctgaaactttgaagaagttcggtgaagaaaaattcaacacctacagaagatccttcgatgttccacctccaccaatcgacgcttcttctccattctctcaaaagggtgatgaaagatacaagtacgttgacccaaatgtcttgccagaaactgaatctttggctttggtcattgacagattgttgccatactggcaagatgtcattgccaaggacttgttgagtggtaagaccgtcatgatcgccgctcacggtaactccttgagaggtttggttaagcacttggaaggtatctctgatgctgacattgctaagttgaacatcccaactggtattccattggtcttcgaattggacgaaaacttgaagccatctaagccatcttactacttggacccagaagctgccgctgctggtgccgctgctgttgccaaccaaggtaagaaataa

SEQ ID NO: 6587 - protein, 247 aa, Saccharomyces cerevisiae; identical to SEQ ID NO: 6233

SEQ ID NO: 6588 - DNA, 936 bp, Saccharomyces cerevisiae
  CDS (1)..(936)
atgactgcaagcacaccatccaatgtcatgacattgttcttgttaaggcatggacaaagtgaattgaatcacgagaatatattctgtggttggattgacgctaagctaaccgaaaaaggtaaagaacaagctcgtcattctgccgagctaatcgaacaatattgtaaagctaataatttgagattaccccagattggttacacctcacgtttaattaggacccaacagaccatagaaacgatgtgtgaagaatttaagttaaagccacaactgcaggttgtttacgactttaataaaatcaaacttggagacgaatttggcagtgatgacaaggataatatgaaaatcccgattcttcaaacttggaggctaaatgaacgtcattacggttcctggcagggccagaggaaaccgaatgttttaaaagaatatggtaaggataaatatatgttcattaggagagattacgagggtaagccaccacctgtagatcttgaccgtgagatgattcaacaagaaaatgagaagggctcttctactgggtacgaattcaaggagccaaacagacaaataaaatatgaattggaatgcagcaatcatgacattgtattaccggattccgaatctcttcgtgaagtggtttatagattgaatccttttctacaaaatgtcatattaaaattagccaatcaatatgatgaatcttcatgcctgattgtgggccatggaagttcagtgagatcgctactgaaaattctggagggtatatcagatgatgacatcaagaatgttgatattccaaatggtatccccttagtcgttgaattagataagaataatggtcttaagtttatcagaaaattctacctagatcctgaatctgctaagatcaatgctgagaaagtccgtaatgagggtttcataaaaaatccttaa

SEQ ID NO: 6589 - protein, 311 aa, Saccharomyces cerevisiae
MTASTPSNVMTLFLLRHGQSELNHENIFCGWIDAKLTEKGKEQARHSAELIEQYCKANNLRLPQIGYTSRLIRTQQTIETMCEEFKLKPQLQVVYDFNKIKLGDEFGSDDKDNMKIPILQTWRLNERHYGSWQGQRKPNVLKEYGKDKYMFIRRDYEGKPPPVDLDREMIQQENEKGSSTGYEFKEPNRQIKYELECSNHDIVLPDSESLREVVYRLNPFLQNVILKLANQYDESSCLIVGHGSSVRSLLKILEGISDDDIKNVDIPNGIPLVVELDKNNGLKFIRKFYLDPESAKINAEKVRNEGFIKNP

SEQ ID NO: 6590 - DNA, 780 bp, Homo sapiens; identical to SEQ ID NO: 6228
  CDS (1)..(780)

SEQ ID NO: 6591 - protein, 259 aa, Homo sapiens; identical to SEQ ID NO: 6229

SEQ ID NO: 6592 - DNA, 780 bp, Mus musculus; identical to SEQ ID NO: 6234
  CDS (1)..(780)

SEQ ID NO: 6593 - protein, 259 aa, Mus musculus; identical to SEQ ID NO: 6235

SEQ ID NO: 6594 - DNA, 780 bp, Oryctolagus cuniculus
  CDS (1)..(780)
atgtctaagtataaactcattatgttaagacatggagagggtgcttggaacaaggagaaccgtttttgtagctgggtggatcagaaacttaacagtgaaggaatggaggaagcccggaactgtggaaagcaactcaaagcgctgaactttgagtttgacctcgtgttcacatccgttctcaatcggtccatccacacagcttggctgatcctggaagagctggggcaggaatgggtgcccgtggaaagctcttggcgtctaaatgagcgtcactatggagccttaattgggctcaacagggagaaaatggctttgaatcacggtgaggaacaagtgaggatctggagaagaagctacaatgtgaccccgcctcccatcgaggagtcgcatccctactaccatgagatctacagtgaccgaagatacagagtgtgtgatgtacccttggatcagctgccacgatctgaaagcttgaaggatgtcttggagagactgcttccctactggaacgagaggatcgctcctgaagttctaagaggcaaaaccgtgctgatatctgctcatggaaacagcagtagggcactgctgaaacatctcgaaggtatctcagacgaagacattatcaacataactctgccaaccggagtccccattctcctggaactggatgaaaacctgcgtgctgttgggccccaccagttcctgggggaccaagaggcgatccaagcagccattaagaaagttgaggatcaaggaaaagtgaaacgagctgaaaaataa

SEQ ID NO: 6595 - protein, 259 aa, Oryctolagus cuniculus
MSKYKLIMLRHGEGAWNKENRFCSWVDQKLNSEGMEEARNCGKQLKALNFEFDLVFTSVLNRSIHTAWLILEELGQEWVPVESSWRLNERHYGALIGLNREKMALNHGEEQVRIWRRSYNVTPPPIEESHPYYHEIYSDRRYRVCDVPLDQLPRSESLKDVLERLLPYWNERIAPEVLRGKTVLISAHGNSSRALLKHLEGISDEDIINITLPTGVPILLELDENLRAVGPHQFLGDQEAIQAAIKKVEDQGKVKRAEK

SEQ ID NO: 6596 - DNA, 636 bp, Schizosaccharomyces pombe
  CDS (1)..(636)
atgactaccgaagctgcacctaacttgctcgtccttacccgtcacggtgaatccgaatggaacaagttgaacttgttcactggttggaaggaccctgccttgtccgagactggtattaaggaggccaagctcggtggtgagcgcttgaagtctcgtggctacaagtttgacattgccttcacctctgctcttcaacgtgcccaaaagacctgccaaatcatcttggaggaggttggtgagcccaacttggagaccatcaagagcgagaagctcaacgagcgttactacggtgacttgcaaggtttgaacaaggatgatgctcgtaagaaatggggtgctgagcaagtccaaatctggcgccgttcttatgacattgctcctcccaacggtgagtccttgaaggacaccgccgagcgtgtcttgccctactacaagtccaccattgtccctcacatccttaagggtgagaaggttctcattgccgctcacggtaactctctccgtgccttgatcatggacttggagggtcttactggtgaccaaattgtcaagcgtgagcttgccactggtgtccccattgtctaccacttggacaaggacggcaagtacgtctccaaggagctcattgacaactag

SEQ ID NO: 6597 - protein, 211 aa, Schizosaccharomyces pombe
MTTEAAPNLLVLTRHGESEWNKLNLFTGWKDPALSETGIKEAKLGGERLKSRGYKFDIAFTSALQRAQKTCQIILEEVGEPNLETIKSEKLNERYYGDLQGLNKDDARKKWGAEQVQIWRRSYDIAPPNGESLKDTAERVLPYYKSTIVPHILKGEKVLIAAHGNSLRALIMDLEGLTGDQIVKRELATGVPIVYHLDKDGKYVSKELIDN

SEQ ID NO: 6598 - DNA, 860 bp, Brassica napus; identical to SEQ ID NO: 2328
  CDS (105)..(689)

SEQ ID NO: 6599 - protein, 194 aa, Brassica napus; identical to SEQ ID NO: 2329

SEQ ID NO: 6600 - DNA, 26 bp, Artificial sequence
  primer
atgactgttactgacacttttaaact

SEQ ID NO: 6601 - DNA, 25 bp, Artificial sequence
  primer
tcatggattcttttcgaaaccctca

SEQ ID NO: 6602 - protein, 297 aa, Artificial sequence
  consensus sequence
  Variant (2)..(4): Xaa in position 2 to 4 is any amino acid
  Variant (8)..(8): Xaa in position 8 is any amino acid
  Variant (10)..(10): Xaa in position 10 is any amino acid
  Variant (13)..(14): Xaa in position 13 to 14 is any amino acid
  Variant (16)..(16): Xaa in position 16 is any amino acid
  Variant (18)..(18): Xaa in position 18 is any amino acid
  Variant (21)..(21): Xaa in position 21 is any amino acid
  Variant (23)..(24): Xaa in position 23 to 24 is any amino acid
  Variant (26)..(28): Xaa in position 26 to 28 is any amino acid
  Variant (30)..(31): Xaa in position 30 to 31 is any amino acid
  Variant (34)..(36): Xaa in position 34 to 36 is any amino acid
  Variant (38)..(45): Xaa in position 38 to 45 is any amino acid
  Variant (46)..(52): Xaa in position 46 to 52 is any or no amino acid
  Variant (54)..(56): Xaa in position 54 to 56 is any amino acid
  Variant (59)..(59): Xaa in position 59 is any amino acid
  Variant (61)..(61): Xaa in position 61 is any amino acid
  Variant (64)..(64): Xaa in position 64 is any amino acid
  Variant (65)..(65): Xaa in position 65 is any or no amino acid
  Variant (67)..(70): Xaa in position 67 to 70 is any amino acid
  Variant (72)..(79): Xaa in position 72 to 79 is any amino acid
  Variant (80)..(120): Xaa in position 80 to 120 is any or no amino acid
  Variant (122)..(124): Xaa in position 122 to 124 is any amino acid
  Variant (125)..(125): Xaa in position 125 is any or no amino acid
  Variant (127)..(127): Xaa in position 127 is any amino acid
  Variant (135)..(135): Xaa in position 135 is any amino acid
  Variant (137)..(137): Xaa in position 137 is any amino acid
  Variant (142)..(148): Xaa in position 142 to 148 is any amino acid
  Variant (150)..(151): Xaa in position 150 to 151 is any amino acid
  Variant (154)..(155): Xaa in position 154 to 155 is any amino acid
  Variant (160)..(163): Xaa in position 160 to 163 is any amino acid
  Variant (166)..(180): Xaa in position 166 to 180 is any amino acid
  Variant (181)..(208): Xaa in position 181 to 208 is any or no amino acid
  Variant (210)..(211): Xaa in position 210 to 211 is any amino acid
  Variant (213)..(213): Xaa in position 213 is any amino acid
  Variant (215)..(219): Xaa in position 215 to 219 is any amino acid
  Variant (221)..(222): Xaa in position 221 to 222 is any amino acid
  Variant (224)..(228): Xaa in position 224 to 228 is any amino acid
  Variant (230)..(230): Xaa in position 230 is any amino acid
  Variant (232)..(235): Xaa in position 232 to 235 is any amino acid
  Variant (236)..(237): Xaa in position 236 to 237 is any or no amino acid
  Variant (239)..(239): Xaa in position 239 is any amino acid
  Variant (240)..(240): Xaa in position 240 is any or no amino acid
  Variant (242)..(244): Xaa in position 242 to 244 is any amino acid
  Variant (250)..(250): Xaa in position 250 is any amino acid
  Variant (252)..(254): Xaa in position 252 to 254 is any amino acid
  Variant (256)..(256): Xaa in position 256 is any amino acid
  Variant (258)..(260): Xaa in position 258 to 260 is any amino acid
  Variant (262)..(263): Xaa in position 262 to 263 is any amino acid
  Variant (264)..(264): Xaa in position 264 is any or no amino acid
  Variant (266)..(270): Xaa in position 266 to 270 is any amino acid
  Variant (274)..(274): Xaa in position 274 is any amino acid
  Variant (276)..(276): Xaa in position 276 is any amino acid
  Variant (277)..(296): Xaa in position 277 to 296 is any or no amino acid
LXXXRHGXSXWNXXNXFXGWXDXXLXXXGXXEAXXXGXXXXXXXXXXXXXXXDXXXTSXLXRAXXTXXXXLXXXXXXXXXXXXXXXXXXXXXXXXXXXXXXXXXXXXXXXXXXXXXXXXXPXXXXWXLNERHYGXLXGLNKXXXXXXXGXXQVXXWRRSXXXXPPXXXXXXXXXXXXXXXXXXXXXXXXXXXXXXXXXXXXXXXXXXXPXXEXLXXXXXRXXPXXXXXIXPXXXXXXGXXVXXXAHGNSXRXXXKXLXXXSXXXIXXXXXPTGXPXXXXXXXXXXXXXXXXXXXXXL

SEQ ID NO: 6603 - DNA, 1764 bp, Saccharomyces cerevisiae
  CDS (1)..(1764)
atggcgaaccgtcttctcatatacggccttattttgtgggtaagtataatcggatcttttgcattagataggaacaaaactgctcaaaatgcgaagattggtctacatgataccactgtgatcacgactggaagtacaacgaacgtgcagaaagaacattcctcaccactatccaccggttctttaagaacccatgattttagacaggcctctaaagttgacatacggcaggctgacatacgggaaaacggtgagaggaaagagcaagatgcactaacacagcctgcaacaccaaggaatccgggcgattcgagtaattcatttttatcgttcgacgaatggaagaaggtcaagtcgaaggagcactcatcaggccctgaacgtcatcttagtcgagtgagggagccagtcgatccctcttgctataaagagaaagaatgcataggagaagagttggaaatcgatttggggtttttgacaaacaaaaacgagtggagtgaaagagaagaaaatcaaaaaggattcaatgaggaaaaggacatagagaaagtttacaaaaaaaaattcaactatgcatccttggattgcgctgcaacaattgtcaaaagcaatccagaagcgattggagcgacttctacgttaattgagagcaaagacaagtatttactgaatccctgttcagctccgcagcaattcattgttatagagctttgtgaagatatcctggtggaggaaattgaaattgctaattacgaattcttttcctcgaccttcaagagatttagggtgtcagtttctgatagaataccgatggttaaaaatgaatggacaatattaggagaattcgaggcaagaaattcaagagaactacaaaagtttcaaatacataatccccaaatctgggcaagttatttgaaaatcgaaattctatcccattatgaggacgaattttattgtcccatatccttaatcaaagtatatggtaaatcaatgatggatgagtttaagatcgatcaactaaaggctcaagaggataaagaacaatccataggaactaacaatataaacaatttgaatgaacaaaatatccaagacagatgtaacaatatagaaacgcgtttagagactccaaacacaagcaatctctcagacttagctggtgcattatcatgtacttcaaagctcatccctttgaagttcgatgaatttttcaaggtgcttaatgcatccttttgtccttccaagcaaatgatatcttcttcttcttcttcggctgttcctgtaattccagaagaatccatttttaagaacatcatgaaaaggctgtcacaactggagacaaattctagtttgacagtttcttacattgaggaacagagcaaactgctatctaaatcgtttgaacaacttgaaatggcgcacgaagcaaagttcagtcatcttgtcacgatattcaacgaaacaatgatgagtaatctagatctgctgaataactttgccaatcaattgaaagatcaatctttacgtatattagaagaacagaaactggagaatgacaaatttactaaccgtcatttattgcatttggaaagattggaaaaagaagtcagttttcaaagaagaattgtttatgcgtcatttttcgccttcgtagggttgatatcctatctattaataacgagagagctttactttgaagatttcgaagagagcaaaaatggcgctattgaaaaggcagacattgttcaacaagcaatcagatga

SEQ ID NO: 6604 - protein, 587 aa, Saccharomyces cerevisiae
MANRLLIYGLILWVSIIGSFALDRNKTAQNAKIGLHDTTVITTGSTTNVQKEHSSPLSTGSLRTHDFRQASKVDIRQADIRENGERKEQDALTQPATPRNPGDSSNSFLSFDEWKKVKSKEHSSGPERHLSRVREPVDPSCYKEKECIGEELEIDLGFLTNKNEWSEREENQKGFNEEKDIEKVYKKKFNYASLDCAATIVKSNPEAIGATSTLIESKDKYLLNPCSAPQQFIVIELCEDILVEEIEIANYEFFSSTFKRFRVSVSDRIPMVKNEWTILGEFEARNSRELQKFQIHNPQIWASYLKIEILSHYEDEFYCPISLIKVYGKSMMDEFKIDQLKAQEDKEQSIGTNNINNLNEQNIQDRCNNIETRLETPNTSNLSDLAGALSCTSKLIPLKFDEFFKVLNASFCPSKQMISSSSSSAVPVIPEESIFKNIMKRLSQLETNSSLTVSYIEEQSKLLSKSFEQLEMAHEAKFSHLVTIFNETMMSNLDLLNNFANQLKDQSLRILEEQKLENDKFTNRHLLHLERLEKEVSFQRRIVYASFFAFVGLISYLLITRELYFEDFEESKNGAIEKADIVQQAIR

SEQ ID NO: 6605 - DNA, 1380 bp, Arabidopsis thaliana
  CDS (1)..(1380)
atgaagcaaagtgagataaataataacacagttccagggaatgatacagagaccactggttcaaagcttgatcagctatctcgtgctgttccgcttggccttgatgagttcaagagcagagcgtccaattctagagacaaatctttgtcaggccaagtaactggcgttattcataggatggagcctggtgggaaagagtacaattatgcagctgcttcaaaaggtgcaaaggtcttatcttctaacaaggaagcaaaaggagcttcaagcatcatatgccgggacaaagacaagtatctccgaaacccgtgttctactgaagggaagttcgttgtcatagaactttcagaagaaacgttggtgaacacaatcaagattgcaaatttcgagcattactcttccaatctgaaggattttgagattttggggaccttggtttacccaactgatacgtgggttcatctagggaatttcacggctttaaacatgaagcacgagcagaactttacatttgcagatcccaaatgggtgagatatctaaagctaaacttgctaagccattacggttcagaattctactgcaccttgagtttactagaagtctatggagtggacgctgtggagcgaatgctggaggatttgatatctatccaagacaagaacatattgaaactccaagaaggagacactgagcagaaagagaagaagacaatgcaagcaaaagagtccttcgaaagcgatgaagacaagagtaaacagaaggagaaggaacaagaagcctcaccagagaatgcggttgtgaaagatgaagtatcacttgagaaaagaaagctgccagatccggtggaagagataaaacatcaaccaggaagcagaatgccgggggacactgtcttgaagatactgatgcagaagataaggtcgctggacgtgagcttatcagttcttgagagttacttggaggaacggagcttgaaatacgggatgatattcaaggagatggacctggaggcgagcaagagagagaaggaggtggagactatgagactagaggtagaaggaatgaaggagagggaagagaatacgaagaaagaggcgatggagatgagaaagtggcggatgagagtggagacagagcttgagaaggctgagaatgagaaagagaaagtgaaggagaggttagagcaagtgttggaaagactggagtggatggagaagaaaggtgtggttgtgttcacaatctgtgtcgggtttgggactatagcagttgtagccgtggtttttggtatggggatagttcgagcagagaagcaaggtggcttggcttggcttctgttattgataagctccacattcgttatgttcattttgtcactttga

SEQ ID NO: 6606 - protein, 459 aa, Arabidopsis thaliana
MKQSEINNNTVPGNDTETTGSKLDQLSRAVPLGLDEFKSRASNSRDKSLSGQVTGVIHRMEPGGKEYNYAAASKGAKVLSSNKEAKGASSIICRDKDKYLRNPCSTEGKFVVIELSEETLVNTIKIANFEHYSSNLKDFEILGTLVYPTDTWVHLGNFTALNMKHEQNFTFADPKWVRYLKLNLLSHYGSEFYCTLSLLEVYGVDAVERMLEDLISIQDKNILKLQEGDTEQKEKKTMQAKESFESDEDKSKQKEKEQEASPENAVVKDEVSLEKRKLPDPVEEIKHQPGSRMPGDTVLKILMQKIRSLDVSLSVLESYLEERSLKYGMIFKEMDLEASKREKEVETMRLEVEGMKEREENTKKEAMEMRKWRMRVETELEKAENEKEKVKERLEQVLERLEWMEKKGVVVFTICVGFGTIAVVAVVFGMGIVRAEKQGGLAWLLLLISSTFVMFILSL

SEQ ID NO: 6607 - DNA, 1401 bp, Arabidopsis thaliana
  CDS (1)..(1401)
atgttaattaaggaaacaaatttagggtcttttaacttggggggtatattccagagattgctatattgtgttcctctgaagaaatcaatttattttgtagatagaattgggaattacactgatggatcagtctcaaagacactgaattccacgagttctgtcttccctcaggccactgagaaagaaaacaacttttgtctcctgagaaaaggccagttacaagatgtgtatgagcatgttcttgtgaacaacgctttgttgatctgcaaagttgtgttgccagaacgaagaataagcaagaaaactctggaagctcgtgatcctagatatgtcaatcttgaagacaagagtctcaaagttaatggctcatcacagcttgtgaataatgggactcgttataggttagaaccagatggaaatgggtataactacgcttctgctatgaagggtgctaaagttgtggatcacaacaaggaagcaaaaggagctagcaatgtgcttggcaaagatcatgataagtatctaagaaatccctgttcagtgtcagataagtatgttgtgattgagctcgccgaggagacactggttgatacggtgagaattgcaaattttgagcattactcttcgaatcccaaagagtttagcttgtcagggagtctgagtttccctagtgatatgtggacacctgctgggagttttgcggctgcaaacgttaagcagatccagtcattccggctcccggaacctaaatggacagatcagattggcaaagaaactgaagctcagaagaagaaagatgatgttgtgaagacgattaatatcataggagacaaaaagtatgaagtcaaggagaagcataacgttttgaaagtgatgatgcagaaagtgaaattgattgagatgaatttatcgcttcttgaggattctgtaaagaaaatgaatgacaaacaaccagaggttagcttggagatgaagaaaaccctagtacttgtggagaaaagcaaagctgacatcagagagatcacagaatggaaagggaaaatgaaactaccaatgaatttgatattctttgagcaggaaaaggaacttagagacctagagctatggaaaactcttgtagcttcccgtgtagaatcattggctagaggaaactctgcattgagattggatgtagagaagattgtgaaagaacaagctaatctagagagtaaagagctgggagttctattgataagcctctttttcgtggtcttagcaacgattcggttagtctcaacacgactctgggcatttctggggatgtctattacggataaagctcgatcactatggccggatagtggctgggtcatgatactgctaagcagcagcatcatgattttcattcatttactctcttag

SEQ ID NO: 6608 - protein, 466 aa, Arabidopsis thaliana
MLIKETNLGSFNLGGIFQRLLYCVPLKKSIYFVDRIGNYTDGSVSKTLNSTSSVFPQATEKENNFCLLRKGQLQDVYEHVLVNNALLICKVVLPERRISKKTLEARDPRYVNLEDKSLKVNGSSQLVNNGTRYRLEPDGNGYNYASAMKGAKVVDHNKEAKGASNVLGKDHDKYLRNPCSVSDKYVVIELAEETLVDTVRIANFEHYSSNPKEFSLSGSLSFPSDMWTPAGSFAAANVKQIQSFRLPEPKWTDQIGKETEAQKKKDDVVKTINIIGDKKYEVKEKHNVLKVMMQKVKLIEMNLSLLEDSVKKMNDKQPEVSLEMKKTLVLVEKSKADIREITEWKGKMKLPMNLIFFEQEKELRDLELWKTLVASRVESLARGNSALRLDVEKIVKEQANLESKELGVLLISLFFVVLATIRLVSTRLWAFLGMSITDKARSLWPDSGWVMILLSSSIMIFIHLLS

SEQ ID NO: 6609 - DNA, 1980 bp, Schizosaccharomyces pombe 972h-
  CDS (1)..(1980)
atggtcaaaagaagattgtctgcatttggaaatgcctttttaatttattttattatatttcggttatgctgctgctctccacaaacgagtcattggtgtaaatatccggcattgtgtttgaagtcaccagatacgcataacgaaaatttggtatgtgatgcgtacctttctgtgattgctaccaaatctgaagaaaaagaagctagcaaccctacaacatgggatttcactcccacaaataagtaccaggaaccttcgtttcacacaaaaacgagtttgaatggaagtgataccatttcttctaattttttgtcaaaatatgaatattccaatggaacaagtactagcgaatttatagattcaattagcccaccattggtgaacgagacgtctacaatttcatcctcaaagaagctagagcaaaactattctgtaacggaagttattgatactaatattattactagttcttcggttactctaccaatttctgaggatggttcctctacttcagcagcagctacaattgattcaaatatagatgaaaagactgttgcattctcagaagaaaaaagattcaactttgcttcaactgactgcgctgctgctgtcattaaaacaaatcctgaagcagtcggatcttcttcgattctgaccgaaaacaaagacaaatatatgctgaacaaatgttccgctgaaaacaagttcgtggtaattgaactttgtgaggatatttatgtcgatacagttcaaattgccaacttcgaatttttttcaagtatatttcgtgatttcaaggtcagtgtaagcggtaaatatccaaaatacgagtcttcttggatggaattgggtacatttacggccttaaacctaaggactcttcaatcttttcatattgagaaccctcttatttgggcgaagtatcttaaaatagagtttttaactcattatgggtcagaattttattgtcctgtaagcctacttagggtttatggaaaaactatgatagaagaatttgaagaagcaaatgaagacttcttagaacaaaaagtgaacgacggaagcgctattaaagcagatgaaatccggaagcctcaagaaagtcctatttttgtggacgaagaagataccgatgttcaaagcaaaccagtgagaaagaatccatcagtcgagttgaatagtacagacaccttactttcttctactgtgatatctaagtctttgagcactgttgttataggaaatgaaacaggaaaaagtgaatcatatcctgcaacatcaactcgctcttttaacgatatttctccatcttcttcatcttcttacagtaccgctcaaatatctacctttccttctaatcaggaaagcatttacaaaaacataaataagcgtctttctaccttagaagaacggaagaaggcatttgatgaaattgtagaaaaaatattaacaaattatggtaagcacaatgccaaaaacatgaattttacgcagctattacatgaattgaactcgacccttcaattagaaatttcgaaattgtcgaaaagtgtcgttaagccgtctttgtttgctctccaagctaaacttgagcttctttctgcagaaaatgaatactttcagagtcaaattacttcactatatcaagaatcatcttttcaaaagcgacttttaatgcttcaactcacggttctaatcgttttaacagtgtatatggccgtatcgaggcttccagaaaatctgccaacaacccgttcatcttcaaacaaccctattgaggcttcaagaccacctttttcacgtgacgagcaagatatttcgaaggccaacgattttcgcgttagcgcttcctcagcggtttataccgttggacctgaactactgcaaagaaaaaagcgagatccaaataccagcatacgcagtatacacgaaagagaacaagataaaattatacattctaggagccattcagtatgctaa

SEQ ID NO: 6610 - protein, 659 aa, Schizosaccharomyces pombe 972h-
MVKRRLSAFGNAFLIYFIIFRLCCCSPQTSHWCKYPALCLKSPDTHNENLVCDAYLSVIATKSEEKEASNPTTWDFTPTNKYQEPSFHTKTSLNGSDTISSNFLSKYEYSNGTSTSEFIDSISPPLVNETSTISSSKKLEQNYSVTEVIDTNIITSSSVTLPISEDGSSTSAAATIDSNIDEKTVAFSEEKRFNFASTDCAAAVIKTNPEAVGSSSILTENKDKYMLNKCSAENKFVVIELCEDIYVDTVQIANFEFFSSIFRDFKVSVSGKYPKYESSWMELGTFTALNLRTLQSFHIENPLIWAKYLKIEFLTHYGSEFYCPVSLLRVYGKTMIEEFEEANEDFLEQKVNDGSAIKADEIRKPQESPIFVDEEDTDVQSKPVRKNPSVELNSTDTLLSSTVISKSLSTVVIGNETGKSESYPATSTRSFNDISPSSSSSYSTAQISTFPSNQESIYKNINKRLSTLEERKKAFDEIVEKILTNYGKHNAKNMNFTQLLHELNSTLQLEISKLSKSVVKPSLFALQAKLELLSAENEYFQSQITSLYQESSFQKRLLMLQLTVLIVLTVYMAVSRLPENLPTTRSSSNNPIEASRPPFSRDEQDISKANDFRVSASSAVYTVGPELLQRKKRDPNTSIRSIHEREQDKIIHSRSHSVC

SEQ ID NO: 6611 - DNA, 1983 bp, Arabidopsis thaliana
  CDS (1)..(1983)
atgcaaaggtcgtgtagaactagaagaagagtttctgtgaacaagtttaatggaaggaacagcttttacaaagtctctttgtctcttgtttttctcctttgggttcttctcttcttttccaccttgttgattagtcatggagatggtgccaaagatgagcctttgaacgactctatgggaatggctgatccggatgatggtcagtcagatgagaaagttgtgccctttgatggaccattatccttagcgtctgcttctgttgatgttacgtctgatttgagtcggaatgatgatgtaaacctgtctgaagaaagtgaagacaaagaacaggaagcagagatcagtagcacagtttcagggaatgatattgaaagcaaggacacttaccttttgaagcaaagtgagataaataagaaagatacagggattgatgcaggaagcaaatatgatgactttcccaagaaaagtgagattaacaatacaggtacgtggaatgatacagaaggcaaagacgataataactttttgaagcaaagtcaattgaacaagacaggcacagggaatgatacagaaagcagtgacaatgagttcttggagcaaaatcagatgaacaaaacagttttagggaatggtaccgagatcaacgtttcaaaggttgatcaaccatctcgtgcggttccgcttggccttgatgagttcaagagcagagcgtccaattctcgaaacaaatcgttatcagatcaggtcagtggtgtgattcacaggatggagcctggagggaaagagtacaattatgcatctgcttcaaaaggcgcaaaggtcttgtcttccaacaaggaagcaaagggggctgcaagcatcctaagcagggacaatgacaagtacctcagaaatccttgttctactgaaggtaaatttgttgttgtagaactttcagaagaaactttggtaaataccatcaagatcgcgaattttgagcattactcttccaatctgaaagagtttgagcttcaaggcaccctagtttatcccactgatacctgggttcatatgggaaacttcacggcttcaaacgtgaagcatgagcagaacttcacacttcttgagccaaagtgggtgagatacttaaagctaaactttattagtcattatggttcagaattctactgcaccttgagtttaatagaagtctacggtgtggatgccgtagaacgaatgctggaggatttgatatctgtccaggacaacaaaaatgcatacaaaccccgagaaggagattctgagcataaggagaagccaatgcagcaaatagagtcacttgaaggcgatgatggtgctgataagagcacgcacagagagaaagagaaggaagccccaccagagaatatgttagcgaagactgaagcatcaatggcgaagagtagtaataagctgtcagagcccgtggaagagatgaggcatcatcagccagggagcagaatgccaggggacacagtactgaagatactgatgcagaagttaaggtcattggacttgaacctatcgattctagagagatacttagaggaactgaacctgagatacgggaacatattcaaggagatggaccgtgaagccggtgtgagagaaaaggcgattgtggctttgagacttgacttggaaggtatgaaggaaaggcaagaggggatggtgagtgaagcagaggagatgaaagagtggcgaaagagagtggaggcagagatggagaaagcagagaaagagaaggaaaacataagacagagtcttgagcaagtaagtaaaagacttgagtggatggagaagaaatgcttaacggttttcaccgtatgtctagggtttggcattattgcggttattgcagttgtgattggtatgggaactggtctagcagagaagaccggtagtggggcttggctcttgttattgattagctcaacattcattatgttcgttttgtctctttga

SEQ ID NO: 6612 - protein, 660 aa, Arabidopsis thaliana
MQRSCRTRRRVSVNKFNGRNSFYKVSLSLVFLLWVLLFFSTLLISHGDGAKDEPLNDSMGMADPDDGQSDEKVVPFDGPLSLASASVDVTSDLSRNDDVNLSEESEDKEQEAEISSTVSGNDIESKDTYLLKQSEINKKDTGIDAGSKYDDFPKKSEINNTGTWNDTEGKDDNNFLKQSQLNKTGTGNDTESSDNEFLEQNQMNKTVLGNGTEINVSKVDQPSRAVPLGLDEFKSRASNSRNKSLSDQVSGVIHRMEPGGKEYNYASASKGAKVLSSNKEAKGAASILSRDNDKYLRNPCSTEGKFVVVELSEETLVNTIKIANFEHYSSNLKEFELQGTLVYPTDTWVHMGNFTASNVKHEQNFTLLEPKWVRYLKLNFISHYGSEFYCTLSLIEVYGVDAVERMLEDLISVQDNKNAYKPREGDSEHKEKPMQQIESLEGDDGADKSTHREKEKEAPPENMLAKTEASMAKSSNKLSEPVEEMRHHQPGSRMPGDTVLKILMQKLRSLDLNLSILERYLEELNLRYGNIFKEMDREAGVREKAIVALRLDLEGMKERQEGMVSEAEEMKEWRKRVEAEMEKAEKEKENIRQSLEQVSKRLEWMEKKCLTVFTVCLGFGIIAVIAVVIGMGTGLAEKTGSGAWLLLLISSTFIMFVLSL

SEQ ID NO: 6613 - DNA, 1878 bp, Oryza sativa (japonica cultivar-group)
  CDS (1)..(1878)
atgcagaggtcgcggagagcccttctgaagaggaaggcggcggcggcggcgaaggaggaggaggaggaggcaggggtgggcgtggctaccgcggcggccgccgggaggaggcggcggcggcggctgtacggcttctccgtctcgcttgtcgtcgcctgctgggtcgtcctgctcctgctcaaccccctcgtcggtcatgggaacggtcaacgagatgaagggatttttgcggatgaaggaagctctgatccctcgtttgattctgttgagcctaccttgagcgaaggctctgttgattcagttgtacagcaggagaatggggaaaatcatgcgttgccaggtgatagctgtgctaaacccgatgaaaatcatgtgctttctgaagagacactgctggagaaagatcagctttgctccaatgatgaggcacagggtgatagcatggatgctctgcccaaggataacgttgatcagggtgagaatcttccacggacagatgatgattctgtagttcatccagagggggaggtggagagcgaaggtgttccaagaccagcaaggttatcacgagttgtccctcctggtcttgatgaattcaagacacgagcgattgcggaaagaggaaagggtgtccctagtggtcaacctggaaatgtgatccacagaagggagcctagtgggaagttgtacaattatgcctcggcagctaaaggggctaaggtcctggaattcaacaaggaggccaagggtgcttctaacatcctagacaaggataaagacaagtatctccgcaatccttgctcagcagaggggaagtttgtcattatagagctgtctgaagaaaccttggtagatacaatcgcaattgcaaattttgagcactattcttctaacttgaaagaatttgaaatgctgagcagtctgaattatcccacagatagctgggaaacactcgggagattcactgttgcaaatgccaagattgctcagaattttacttttcctgagccaaagtgggctagatatctgaaactcaacttgcttagccattatggttccgaattctactgcacgctcagtatgcttgaagtgtatggaatggatgcggtggaaaagatgctggagaacttgattccagttgagaataaaaggctggaacctgatgacaaaatgaaggaaccagtcgatcagcaaacacaattgaaggagcccactgagggaaaagaatcctcacatgaacccctggatgaagatgagtttgaactagaagatgataaactaaacggtgattcatcaaagaatggtgctcatgatcaagttaccgagacaaggccaattcaggctggcaggattcctggagatacagttcttaaggtactaatgcagaaggtgcaatctcttgatgtgagcttttctgtcttggagcggtatctagaagaactaaatagcagatatgggcaaatttttaaggattttgatgctgatattgataccaaagatgcactcttggagaaaatcaaattggagctgaagcatcttgagagaagcaaagatgactttgcgaaagaaattgaagggattctctcatggaaactagttgcttcctcacagttaaaccagctactcttggataatgtcataatcagatcagaacttgaaagatttcgggaaaagcaggctgacttggagaatagaagctttgctgtaatattcctgagttttgtttttggatgtttagcgattgctaagctgtctataggcatgatatttaatacctgtagattatataattttgaaaaattcgatagggtaaaatctggatggcttgtgttgctgttcagcagttgcattatagcctccattttgataatacagtga

SEQ ID NO: 6614 - protein, 625 aa, Oryza sativa (japonica cultivar-group)
MQRSRRALLKRKAAAAAKEEEEEAGVGVATAAAAGRRRRRRLYGFSVSLVVACWVVLLLLNPLVGHGNGQRDEGIFADEGSSDPSFDSVEPTLSEGSVDSVVQQENGENHALPGDSCAKPDENHVLSEETLLEKDQLCSNDEAQGDSMDALPKDNVDQGENLPRTDDDSVVHPEGEVESEGVPRPARLSRVVPPGLDEFKTRAIAERGKGVPSGQPGNVIHRREPSGKLYNYASAAKGAKVLEFNKEAKGASNILDKDKDKYLRNPCSAEGKFVIIELSEETLVDTIAIANFEHYSSNLKEFEMLSSLNYPTDSWETLGRFTVANAKIAQNFTFPEPKWARYLKLNLLSHYGSEFYCTLSMLEVYGMDAVEKMLENLIPVENKRLEPDDKMKEPVDQQTQLKEPTEGKESSHEPLDEDEFELEDDKLNGDSSKNGAHDQVTETRPIQAGRIPGDTVLKVLMQKVQSLDVSFSVLERYLEELNSRYGQIFKDFDADIDTKDALLEKIKLELKHLERSKDDFAKEIEGILSWKLVASSQLNQLLLDNVIIRSELERFREKQADLENRSFAVIFLSFVFGCLAIAKLSIGMIFNTCRLYNFEKFDRVKSGWLVLLFSSCIIASILIIQ

SEQ ID NO: 6615 - DNA, 3762 bp, Rattus norvegicus
  CDS (1)..(3762)
atgaagaagtaccggcgggccttggccctggtctcctgcctctctctctgctctctagtctggcttccaagttggcatgtatgctgtaaagagagttcttcagcttcaacatcatactattctcaagatgataattgtgcagtaggaagtgaagacatacagttccagaaaaagaatgaaagagaagaacctagtaatgctaaagtatcagaaaaatcaaattcatatttaactatatctccagaagaaaataaattaaaagatgactacactgtggatgaatgcaaaatatggaaacagtcgaagttaagtctacctgtggttgaagcactccctacagttgattcgcatgaagagtcttccagtgtagttgtaggcagtgaaaacatcgaaaatagttccagttcatctacctcagaaaccagtccaatctcaaagcttgatgaaatagaaaactctggtactttatctgtagccaagccaggtgacacagagcagcctgaagctgactgtgatgctggggaggctgcggacgcagatgcttccgtggagcagcctgctttcgtcagtgcaccggagagccttgttggccaacatatagagaacgtgtcgtcttcacatggcaaagaaaaagtaacaaaatcagagtttgaatcaaaagtttcagtgagtgaacaagatggcggtgatccaaagtctgcattgaatgcttcagatactttaaaaaatgagagctctgattatacaaaaccacgagaaactgaccctacatctgttacaagtcccaaagacccagaagatatacccacatttgatgagtggaagaagaaagttatggaagtagagaaagaaaaaagtcagtcgttgcacccatcttctaatggaggtccacatgccaccaaaaaggtccagaaaaatagaaataattatgcctctgtagaatgcggtgccaaaattttggcagctaatccggaagccaagagcacatctgctattcttatagaaaatatggatctttatatgctgaatccttgcagcactaaaatatggtttgttattgagctttgtgagccaattcaagtgaaacagtttgatattgcaaattatgaattattttcttctactcccaaagactttctggtttctatcagtgacagatatcccacaaataaatggattaagctgggtactttccatggtagagatgagcggactgtccaaagtttccccctggatgaacagatgtatgcaaaatatgtgaagatgttcatcaagtacataaaggtggagctgttgtctcattttggatcagagcacttctgtcctttaagcctaataagggttttcggtactagtatggtggaagaatatgaggaaattgctgactcccagtatcaatcagagcgtcaggaactatttgatgaggactatgactatcccctggattataatactgtggaggataaatcttcaaagaatcttcttggttctgctacaaatgccattctaaatatggtgaatattgctgctaatattctgggagcaaaaactgaagacttgacagaaggagataaaagtatatctgagaatgccactgccacaactgaacctaaaatgcctgaatcaactggtgtttcaactcctgttccatcgcctgaatatataatcaaggaagtccatacacatgatacagaaccaccaacctcagatcctccaaaggagagtccgattgtacagctggttcaggaggaagaggaggaagcaagcccatctacagtgacccttctgggcagcggcgaacaggaggatgagtcctcatcctggtttgagtctgagacacaaatactttgtagtgaactgacctcaatttgttgtatttctagtttttcggagtacttatataaatggtgctcagttagaatcgctctttatcgacaacacagcagaactgtgagtaaaggaaaagatgtgtcacctcagccatcgttactccctcctgtagactcagtagaagtttcagtactgcagcctcccagtggaaatgtggataaggaggacatggaaagagaattggagactgtggctctggatgatttaagtagtgtgcaccaggctcatgtgaggaatcacacagtggatacagttgaacttgaaccaagctaccctcaaactctctctcagtcccttcccttagacgttactccagaaatggattcactgtctacagtagaaggatctgagtctgttaaatctgagggaggacataaaccatcgcaagtcatgccccaagagagttctgtcgagtttgatgacgaaacagaaaaaaagcctgagagctttagttctgttgcgaagctctctgttatttatgaaacaagtaaagttaacgaggtaatggacggtcctgtgaaagaagacatagtctccacacacgtggtcaccaagttccctgaaaccaagttccctgaaacagtagcaccaccccctataaacacagccgctgtgcctgagagtgaaggcatggaaaccaaacctagtttagctgatacactaaagcacgtagtgacgcccgttacagatccttcattgcctgaagtgaaagaggatgagcagtctccagacgatgcccttttaagagggttacagaggacagctacagatttctatgctgaactacaaaattctacagatctgggatatggtaatggaaaccttgtacatggatcaaatcagaaggagtcagtatttatgagacttaataatcgtattaaagccttagaagttaacatgtctctcagtggtcgttatctggaggagcttagtcaaaggtaccgaaaacaaatggaagaaatgcaaaaggctttcaataaaacaatagttaagcttcagaatacttcacggatagcagaagagcaggatcagcggcaaactgaagccatccacttgctgcaggcacaactgaccaacatgacacagattgtttcaaacttgtcagcaactgtagcagaattaaaacgggaggtttcagatcgtcagagttaccttgtcatgtctttggttctatgtgtggtcttgggactgatgctctgtatgcaacgttgtcgaaatacttctcaatttgatggagattacacttcaaaacttcctaaaagtaatcagtacccaagccctaaaaggtgtttttcctcctatgatgacatgaatttgaaaagaagaacctcatttcccctcatcagatccaagtctttgcagtttactggcaaagaagacccgaatgatttgtacatcgtagaacccctcaagttctctccagagaaaaagaagaaacgttgcaagtacaaaactgaaaaaattgagacaataaagcctgcagatccattgcaccctatagccaatggagatataaaaggaagaaagccctttacgaaccagagagatttttctagtatgggagaagtttatcactcttcttacaagggccctccgtctgagggaagctcagaaacttcatcacagtcagaagagtcctatttttgtggcatttcagcttgtacaagtctgtgcaatggacagacccaaaagacaaaactgagaagaggcttaaaacgaaggcgatctaaagtccaagaccaaggaaagttaataaaagctcttatacagactaagtcggggtcattgccgagcctgcatgacataatcaaaggaaacaaggagatcaccgtgggagcatttggggttacagcagtctcgggacatatctaa

SEQ ID NO: 6616 - protein, 1253 aa, Rattus norvegicus
MKKYRRALALVSCLSLCSLVWLPSWHVCCKESSSASTSYYSQDDNCAVGSEDIQFQKKNEREEPSNAKVSEKSNSYLTISPEENKLKDDYTVDECKIWKQSKLSLPVVEALPTVDSHEESSSVVVGSENIENSSSSSTSETSPISKLDEIENSGTLSVAKPGDTEQPEADCDAGEAADADASVEQPAFVSAPESLVGQHIENVSSSHGKEKVTKSEFESKVSVSEQDGGDPKSALNASDTLKNESSDYTKPRETDPTSVTSPKDPEDIPTFDEWKKKVMEVEKEKSQSLHPSSNGGPHATKKVQKNRNNYASVECGAKILAANPEAKSTSAILIENMDLYMLNPCSTKIWFVIELCEPIQVKQFDIANYELFSSTPKDFLVSISDRYPTNKWIKLGTFHGRDERTVQSFPLDEQMYAKYVKMFIKYIKVELLSHFGSEHFCPLSLIRVFGTSMVEEYEEIADSQYQSERQELFDEDYDYPLDYNTVEDKSSKNLLGSATNAILNMVNIAANILGAKTEDLTEGDKSISENATATTEPKMPESTGVSTPVPSPEYIIKEVHTHDTEPPTSDPPKESPIVQLVQEEEEEASPSTVTLLGSGEQEDESSSWFESETQILCSELTSICCISSFSEYLYKWCSVRIALYRQHSRTVSKGKDVSPQPSLLPPVDSVEVSVLQPPSGNVDKEDMERELETVALDDLSSVHQAHVRNHTVDTVELEPSYPQTLSQSLPLDVTPEMDSLSTVEGSESVKSEGGHKPSQVMPQESSVEFDDETEKKPESFSSVAKLSVIYETSKVNEVMDGPVKEDIVSTHVVTKFPETKFPETVAPPPINTAAVPESEGMETKPSLADTLKHVVTPVTDPSLPEVKEDEQSPDDALLRGLQRTATDFYAELQNSTDLGYGNGNLVHGSNQKESVFMRLNNRIKALEVNMSLSGRYLEELSQRYRKQMEEMQKAFNKTIVKLQNTSRIAEEQDQRQTEAIHLLQAQLTNMTQIVSNLSATVAELKREVSDRQSYLVMSLVLCVVLGLMLCMQRCRNTSQFDGDYTSKLPKSNQYPSPKRCFSSYDDMNLKRRTSFPLIRSKSLQFTGKEDPNDLYIVEPLKFSPEKKKKRCKYKTEKIETIKPADPLHPIANGDIKGRKPFTNQRDFSSMGEVYHSSYKGPPSEGSSETSSQSEESYFCGISACTSLCNGQTQKTKLRRGLKRRRSKVQDQGKLIKALIQTKSGSLPSLHDIIKGNKEITVGAFGVTAVSGHI

SEQ ID NO: 6617 - DNA, 2298 bp, Eremothecium gossypii
  CDS (1)..(2298)
atgagagcaagcagtatatgcgatatagttttagctgtatggctgctgccattatcacaaacagtggcacaagtagtgcagcgagagaatgactggcagtcaatagaggccagcagagcaggcatgttcgggaacagcgtgcaaggcgggtgtgatggagtttgcgagccacaggagggccctgtaactgcgattatgaatatgtgggagaatgtggacgcgtcgcccatccctgagcgccctgagatgacagacatcgacctggttccaccgggcaagcagacggggaacgcattcagctttactagccgaggcagtgcggaggcaggcgtgggcgctccgactgtgtggtccccgcaactgacggggtgcggggaccactcgcgctcgtacagtcaggcggtagcctctgagccagtttcagcagagagctcgcaacttgcatcacaggctcccgaagtgcttgaggaatttagtctgcgcgaagcggatgaagagggtgatctgcataatgaaacggagttccttccgtttgacgagtggaagcggattaagctcgatgaggagaaacgagctagtgttcattcggaaactcacacacggacccgcatacctgtggactataaccgtgcggatgctcttggggatgagatggagatagacgtggggatgtttacgtcgatggaagacgatgaacccgaaggcaagttgtatcatgagaaatttaactatgcgtcgctggattgtgccgcgtccatcgttaagacgaattccgaggcgcaaggagcctcttccatcttgtatgagaataaggacaagtatcttttgaatccatgttcagctgtgaataagtttgtggttattgaactctgccaagatatcttggtggaggaaattgagatggccaactacgagtttttctcatccacctttcaaaacgtacgattttctgtctcggatcggtttccagttcctaaaaacgggtggaaagttttgggggagtttactgcggtcaatagcagggatatacagaagtttggaattcccaaccccaagatttgggctcggtatctacgagtggaaatattgtctcattacggaaacgagttctactgcccgatatctgtggtgcgcactcacggtaagactatgatggaagaattcaagttagcgcagagtgtagggaacagtcaggaatcggaagttctacagcccgctccagaccgaattttgaactccaccttgcataatgcttcctttttgtgtactggctcgcatcacaataataatggaggaccactaagtttttcaagcaacaatgtctccgtagagctgttcgcagatgatatggcttcccagtgtcgcgctgcactccctcccctccggtttgaggagttcatcgacggttttgatgacatctcctgcggccagaaacattccaaatcaatgaacttcacgggaaccatctccaattctgctactgaagagtcaatattcaagaacataatgaagcggctcaccaccctagaaacaaacgctacactttccattctttacattgaggaacaaagtagattgctatccaagtcattctattcattagaaaaaaaccatgccaagaagtttgattctctagtctcaatcttcaatgaaactatgatgcataaccttgagaccctaaacgtttttgccaagcaacttaaagactcgtctatgcaccttctggaagaacaaaagctaagcactgaccaatttacctctatgactatccagcgcctagatatgatggaacgagacgcgagatttcagaagaggatggtttacttaatcctagtcgctgttgctgcgttattagtctatgtcttgttaacgcgcgaggcgtacattgacgattatatggaagatgacggttggtatttggactcgccacccttgcagaaggccaaggacaaactcatgcggaaggccgcacgggcagtttcgacacccacaatttttaagaacttccaggacgacattgcgccaatgaagattaggcgtaacccttccttttcctcctcttctagcatttcagacgtctcgcagtacttgattgacaacgacgacgacagcgtctttctaggacgccccaggacttactcaaagctgctggcagccgacgagaatgaaatagacatcgatgaaataatgacccactctagtgataactccgatgtttcacatggtatggataggctgctagatgccgatggaactgaagtctcttctcgcgagtccagtgatggagagcccaagtga

SEQ ID NO: 6618 - protein, 765 aa, Eremothecium gossypii
MRASSICDIVLAVWLLPLSQTVAQVVQRENDWQSIEASRAGMFGNSVQGGCDGVCEPQEGPVTAIMNMWENVDASPIPERPEMTDIDLVPPGKQTGNAFSFTSRGSAEAGVGAPTVWSPQLTGCGDHSRSYSQAVASEPVSAESSQLASQAPEVLEEFSLREADEEGDLHNETEFLPFDEWKRIKLDEEKRASVHSETHTRTRIPVDYNRADALGDEMEIDVGMFTSMEDDEPEGKLYHEKFNYASLDCAASIVKTNSEAQGASSILYENKDKYLLNPCSAVNKFVVIELCQDILVEEIEMANYEFFSSTFQNVRFSVSDRFPVPKNGWKVLGEFTAVNSRDIQKFGIPNPKIWARYLRVEILSHYGNEFYCPISVVRTHGKTMMEEFKLAQSVGNSQESEVLQPAPDRILNSTLHNASFLCTGSHHNNNGGPLSFSSNNVSVELFADDMASQCRAALPPLRFEEFIDGFDDISCGQKHSKSMNFTGTISNSATEESIFKNIMKRLTTLETNATLSILYIEEQSRLLSKSFYSLEKNHAKKFDSLVSIFNETMMHNLETLNVFAKQLKDSSMHLLEEQKLSTDQFTSMTIQRLDMMERDARFQKRMVYLILVAVAALLVYVLLTREAYIDDYMEDDGWYLDSPPLQKAKDKLMRKAARAVSTPTIFKNFQDDIAPMKIRRNPSFSSSSSISDVSQYLIDNDDDSVFLGRPRTYSKLLAADENEIDIDEIMTHSSDNSDVSHGMDRLLDADGTEVSSRESSDGEPK

SEQ ID NO: 6619 - DNA, 3171 bp, Neurospora crassa
  CDS (1)..(3171)
atgcgcaccccaccaactcttttcctgggcttgctgggtctccacgcagttgcagcggcactcccagaaccagcatcggtatgtgaatcgagaaccgtcaactacatcacccataccctaccgcaacaatgtcttcgtactgcgtggacgaccccaactgccgttacgagcgcagtcgccgccgacaccacctcttctgaggtccccagtaacgaaaccgcagcgccggcgcaagcgaacgagagtcagcagcaacatccggaccagtccaagccttcggcggaacacacacaggagcagacaaaggaagaacaggaagatgaggacttggcggctagcactttcatgtcgtttgaagaatggaaggagatgatgctgcgcaagtctggcgaccccgccaacaccaagggcggacagaagcagccggcacagcagagaaccggcggcgagcatgaccagaacggtcccagcagcgataccgacaaccaccggccaggagacgacggcgaaaaccccctaaacttcgacgccctctcggaaaaagtctcggaactgacctcttcaccctcgggtgacccctcgaccgattacggcagcgacaaagccagaacggacgaccaagttgttcacgaggacggcaaaacgcaatactatcgtagcaaggacgccggaaagacatgcaaggagcgcttttcgtactcctccttcgacgccggtgctattgtcaagaagacaagccctggggccaagaacgccaaagccattctcgtcgaaaacaaagactcgtacatgctccttgaatgtcatgccaagagcaagtttgtcattgtccagctgagtgacgatatcctcgttgacacggtggtcctggcaaactttgagttcttctcgagcatgatccgccagttcaaggtcagcgtgagcgaccgctaccccgtcaagctggacaagtgggttgagctgggaacgttcgaggcgaggaactcgagggatattcaggccttctcggtggaacatcctcagatttacaccaagtatatccggattgagttcctcagccattacggaaatgagtattactgccctgtgtcgctactcagagtccatggaaccaggatgctggatacatggaaggagccggatgataggcacgatgatgagcaggagacaatcgaagctcccccagtgcaggagcagttgccgcagactcctgaacctgagcagccgagtcctcaagttggacaaccgagtgttgcgagtgagccggcgcccagtactgtcaccgaactagaagaaaagacacatcagaaaaccgagcctgtccaggtcgtggagctgggcttcacgccctgggaacccgtattctatcgtgacttttctcttgaaatttgcgacttgcgttcgcgaacaactggtcaatccactgccatctcgcccgaagcagacaacaaacagggtagaaactccaatacggccaaggagcaggcctcaaccggaagcgctgtgcacgagactttagtgcccaagggttcttcagcagcatcgaaacctcaggaaatagcgaaggcccaacccgccagctctgctgcgtctcacacttctgtaccgcctcaagtaagcggcaccacaacgggctctcccagcaacaagggccccctatctcgttctaataccgccagcaatgagaccgccccttcagtttctcccgccgcgaagccctctggcagcagcaacagcacagccggcaccacaagccgtagcgacagcaaagacaacggcaacaacgccagcgccagcgccggtaccggcggcagccccgttaacaacggcagccaaaacaacaaaaacaaccaatcccgaaaaccagcctccggcgccggtcacggcggctcaccgacctcctccgcccccccttcacctaccgtccaagaatccttcttcaaaacagtccacaaacgcctcacgcacctagaatccaacacctcgctctccctccaatacatcgagcaacagtcgcgtttcctgcaagacgtgctctccaaactcgagcggcgccagctcacgcgcgtcgacacctttttggacacgctcaacaagacggtattaacagaattgcgcaacgtgcggcagcagtacgaccagatctggcagagcacagtgattgctttggagacgcagcgggagcagacggagcgcgaagtggtggcgctcagtggacggttgaacgtgttggcggatgaggtggtgtttcagaagaggatggcgattttgcagagcgtgttgttgttgagttgtttgatattggttatcttcaataggactggtggtggtggtggcggcggtaatggcggcgggggtattgcgttaaacagtaatggaggaacagggggcaggcctggttcaagaggcggaggagggggagggggagtgtcaacgtctggggtacaacagcaagtgacggcagcagcaacagtagaagcacgttcgggctcgggcgaggatgcagatgccgtgggaacaagcacggttgttgatatcgcgacagcacaacaacgcaatcagcagcagcttcatccgaatgataaccacaacctcgggcaacgccaacatcaacacatgttacagacacagcaacactcatatgcttacccacgcaacaatgacaaagctctcccgctcactcccacctccgagtatgatagcagggaagggaccccacttgttcacacatcgccactccggcagacatcaacgaccatagacgaggttctggctgcagaggatgtcgacggtaattcacagatatatacgcagtcgtcgtttggacccgagcccgaatgcgtcccagatcaggaggagtcgtctcggttttcatcgtctgaatttgaatctggcgggttgacgccaccgagaacattagagacatatcaagaaagcaccgagcctaaccacaacggagttgcgaacgtacctgttcgttctaactccgccgaagaaagtagcgagaggattgaggaagacgataatggtctgatgccggtggattccattgagtatcaacagcagcaaacactacggccccgagccaggccttcacgtactcaccttggctcagagaccgtgaagccattgcccgctgtaccagaaacttccaagttcataataacataa

SEQ ID NO: 6620 - protein, 1056 aa, Neurospora crassa
MRTPPTLFLGLLGLHAVAAALPEPASVCESRTVNYITHTLPQQCLRTAWTTPTAVTSAVAADTTSSEVPSNETAAPAQANESQQQHPDQSKPSAEHTQEQTKEEQEDEDLAASTFMSFEEWKEMMLRKSGDPANTKGGQKQPAQQRTGGEHDQNGPSSDTDNHRPGDDGENPLNFDALSEKVSELTSSPSGDPSTDYGSDKARTDDQVVHEDGKTQYYRSKDAGKTCKERFSYSSFDAGAIVKKTSPGAKNAKAILVENKDSYMLLECHAKSKFVIVQLSDDILVDTVVLANFEFFSSMIRQFKVSVSDRYPVKLDKWVELGTFEARNSRDIQAFSVEHPQIYTKYIRIEFLSHYGNEYYCPVSLLRVHGTRMLDTWKEPDDRHDDEQETIEAPPVQEQLPQTPEPEQPSPQVGQPSVASEPAPSTVTELEEKTHQKTEPVQVVELGFTPWEPVFYRDFSLEICDLRSRTTGQSTAISPEADNKQGRNSNTAKEQASTGSAVHETLVPKGSSAASKPQEIAKAQPASSAASHTSVPPQVSGTTTGSPSNKGPLSRSNTASNETAPSVSPAAKPSGSSNSTAGTTSRSDSKDNGNNASASAGTGGSPVNNGSQNNKNNQSRKPASGAGHGGSPTSSAPPSPTVQESFFKTVHKRLTHLESNTSLSLQYIEQQSRFLQDVLSKLERRQLTRVDTFLDTLNKTVLTELRNVRQQYDQIWQSTVIALETQREQTEREVVALSGRLNVLADEVVFQKRMAILQSVLLLSCLILVIFNRTGGGGGGGNGGGGIALNSNGGTGGRPGSRGGGGGGGVSTSGVQQQVTAAATVEARSGSGEDADAVGTSTVVDIATAQQRNQQQLHPNDNHNLGQRQHQHMLQTQQHSYAYPRNNDKALPLTPTSEYDSREGTPLVHTSPLRQTSTTIDEVLAAEDVDGNSQIYTQSSFGPEPECVPDQEESSRFSSSEFESGGLTPPRTLETYQESTEPNHNGVANVPVRSNSAEESSERIEEDDNGLMPVDSIEYQQQQTLRPRARPSRTHLGSETVKPLPAVPETSKFIIT

SEQ ID NO: 6621 - DNA, 2868 bp, Magnaporthe grisea 70-15
  CDS (1)..(2868)
atgcgactgaaggcgacgagctgcaatcgattttgtatctcgctcgtctggggccttgcgctactcggacgtcatggctcggccgctcagccgggtcgcgacgcgcaggccgccgccgccgcctccgcgataggatcatgcgaggcgaggaccatcaactacataactcacaccttgccgcagcaatgtctgcgcacctcttggtccagcgcttccaacgacgcggcggcagctccggcaggaccaatcgtcacttcaaccacgggcgaaccgacagcggcccctgaaacggaagggcaaaacaatgaccagaagacagatagtgaaacgggtggcgcagacgatggccaggatcaggagctggccaccagctcgttcatgcccggaacaacgatgacgggtcgggccagcaacagcagcaaggcggagaaggaggtcgagacgagggagagacaaacctggattttgacgcactgtcggagaagagtctctagagataacggcttcgggagctggatcgacgagagcgaggctacgggtaagcagctggagcaacagaagcagcagcaagacagcaagggtgaggatcttgccatatacgatggcctcgactacacccgcagcaaagacgcaggcaaaacatgcaaggagcgattctcatatgcctcctttgacgccggcgctacggttctcaaaactggcccgcgcgctaagaacgcaaaggccatcttggtcgagaacaaggactcatacatgttgctcgagtgcgcccagcccaacaagttcgtcatcatcgagctgagcgacgacgtcctggtcgacaccgtcgtcattgccaactttgagttcttctccagcatgatccgtacgttccgcgccagcgtgagcgaccgttaccccgtcaagctggagaagtggaaggtcattggcacattcgaggcccgcaaccagagggatatccaggccttcttggtcgagcacccccagatctgggccaagtatatccgtatcgaatttttgaaccactacggcagcgagttctactgtcccatctcgctggtacgcgtgcacggcacccgcatgatggattcgtggaaggaggtcgagggtggccgtgatgacgatgacgaggccattgatcaaggcatgcccactatttctcagcagccatccgagccgcagccgcagccagcagtcgaggagccaagtccgcccgaacctgtgcctgcggacaatgcgaccagtgcccctccagtcgtcactgaaatggggctcacaccatgggaacccatattccgcgagttctcctcgtttgagatgtgcgagatgccagaaccaacggccacagattctggcctagctggccagtcttcggtagtctccgggcccgagactcagcctatgcatgatggaagacctcatgattctgtagatgggaaccgatcaacggcacagaaaccagtatcatcgttgacgtccgccattttcaaagagaccgctgcgcctcgaggaaatgtcacaatgcctgatccggcagcttccgtttacaatatcgaaaatctggtaccaccaccgctggcatcaaccgaatcaccatcaggggctaaggatcccgcctctacttcatcaacctccacacaagcttcgtcctccaaacatgttagcaacagcagcaagcataaaacactagtatctaaaccttcctcggcctcggccaaacccgcgatgcccaagccgtcaagcacagtgccttcttcagctaggaacagaaccggcaccaacaccaacagcgcagcggcagcgtccccaaccgtacaagaatccttcttcaagacggttgccaagcgcctgcagttgctcgagtccaacacctcactttcgatgcagtacattgaggaccagtcccgcttccttcaggatgcccttgcgaggatggaacgcaagcaaatctcgcgggtcgacaccttcctcgacaccctcaaccggaccgttctggccgagctccgctcagtccgttcccagtacgaccagatctggcagagcaccgtcatcgctctcgagtcgcaacgtgaccaatcccagcgcgagatcgtcgccctcagcgacaggctcagcgtcctagcagaggaggttgttttccagaagcgcatggccatcctgcagtccattctgctgctggcctgtctagtcctcatcatattctcccgtgcgttcggcggtgccgcatcgacggtcaccttttccgggaccccgcgccactcgcgctgggcattcaccatgcccatgtctcctcctccttccgccggcccccctacaggcaggagatacggtccgggcccgccatcaccctcgccatcgccatccaggctcggcagcattccaccacggtcgccgccagaagatgacgaccggctggctgccatcgatacccgtcatcggtacgccgacaagactctacccctaacgccgacttccgagtacgacgccggcgggcgggaagttacacccgtaattcacgtggtcgacgaaacaggcgagcccagctattttgacgacaccgctagcttctcttcgccccaacggctgggaagcgaggcgagcgatgccacccctgaccttggctacggcagcgatacacacgtagagcccgccgacccagtggtcatttcctcggaacctgccgatgaggagaatgtctcccgtgccgagcaggccaagtacccacctgggggtgaggaaaacgatggctttgaggccgacgctgctgataaagaagtagagggatctggtccccctttaacgagaaccacactgcccgactttggggattctcgaaagccgctccctgctctgcctgaaagcccataa

SEQ ID NO: 6622 - protein, 955 aa, Magnaporthe grisea 70-15
MRLKATSCNRFCISLVWGLALLGRHGSAAQPGRDAQAAAAASAIGSCEARTINYITHTLPQQCLRTSWSSASNDAAAAPAGPIVTSTTGEPTAAPETEGQNNDQKTDSETGGADDGQDQELATSSFMPGTTMTGRASNSSKAEKEVETRERQTWILTHCRRRVSRDNGFGSWIDESEATGKQLEQQKQQQDSKGEDLAIYDGLDYTRSKDAGKTCKERFSYASFDAGATVLKTGPRAKNAKAILVENKDSYMLLECAQPNKFVIIELSDDVLVDTVVIANFEFFSSMIRTFRASVSDRYPVKLEKWKVIGTFEARNQRDIQAFLVEHPQIWAKYIRIEFLNHYGSEFYCPISLVRVHGTRMMDSWKEVEGGRDDDDEAIDQGMPTISQQPSEPQPQPAVEEPSPPEPVPADNATSAPPVVTEMGLTPWEPIFREFSSFEMCEMPEPTATDSGLAGQSSVVSGPETQPMHDGRPHDSVDGNRSTAQKPVSSLTSAIFKETAAPRGNVTMPDPAASVYNIENLVPPPLASTESPSGAKDPASTSSTSTQASSSKHVSNSSKHKTLVSKPSSASAKPAMPKPSSTVPSSARNRTGTNTNSAAAASPTVQESFFKTVAKRLQLLESNTSLSMQYIEDQSRFLQDALARMERKQISRVDTFLDTLNRTVLAELRSVRSQYDQIWQSTVIALESQRDQSQREIVALSDRLSVLAEEVVFQKRMAILQSILLLACLVLIIFSRAFGGAASTVTFSGTPRHSRWAFTMPMSPPPSAGPPTGRRYGPGPPSPSPSPSRLGSIPPRSPPEDDDRLAAIDTRHRYADKTLPLTPTSEYDAGGREVTPVIHVVDETGEPSYFDDTASFSSPQRLGSEASDATPDLGYGSDTHVEPADPVVISSEPADEENVSRAEQAKYPPGGEENDGFEADAADKEVEGSGPPLTRTTLPDFGDSRKPLPALPESP

SEQ ID NO: 6623 - DNA, 2712 bp, Gibberella zeae PH-1
  CDS (1)..(2712)
atgaagggcggagagtacagacgcagattgaagtggggaaggggaaaccatctggtgcctatttactatacaaaaatgtttgatgtggtacactttagtgataggtcgccctacgttgtcaaacgtgtgcggattcagctttcctatcttgaattcaatcgattcagcttttgcgccttcctttcccactgtgttattgcggttgcagcttatagatcgtacatgtatcgaaccaatcaacatctcactgttcaaccacccacgtcagtctcgtcctgcgacgcccgcactatcaattatatcacccacacccttccccagtcctgccttacgatctcttggacgagctcaactacgacttccactccttcactctccaattcgactagcgatacttcttccgacccggcacaaagcaatgcgccgtcatccagcgtactaagcgactcccaatcccaacctcaaccatcttccaccgccactccgcccaaggacgaatcgcaagatgcagctggagatggagccgagaaaccattcatgtcctttgaggactggaaagagttgatgctgcgcaagacagggcaggaccctcaagacctccatgccagaaacaccaagccacgcgacaggacaccgccagatatgggccacgccggcctcggcgaagaagacgagatatcattgaacttcgacagttatctggataacgccggaaagcaaaacgagcctccttccgatgtcgaccaagctaaaggcgatgggtcagccaaggcaatctcaattcataggagtaaagatgccggcaagacgtgcaaggaacgattctcatattcgtcttttgatgcgggtgccaccattctcaagacaagtcctggcgcaaagaacgccaaggccattctcgttgagaacaaggactcttacatgcttctcgagtgctctgccaagagcaagttcgtcatcgtcgaattgagcgatgatgtcctcatcgacactgttgtcctcgcaaacttcgaattcttctccagcatgttccgccactttactgtcagcgttagtgaccggtacccagtcaagatggacaagtggaaagagatcggattgttcgaggcacgaaactcgcgcgacatccaaccctttctggttccgaatccccagatcttttcaaagtatgtccggatcgagtttcttacccattggggaaaggaattctattgcccggtctccttacttcgtatccatggctctcgtatgctcgattcatggaaagaagctgaccaagctcgtgatgatgattcaaaccctgaagaagaggccgaggagactcagcagtctctcccttcaggggaagaagcgccaaagatacaaggagccgagaaaaaccctgagcctgtcaaaaccaccgctatggagaagatgccttattgtgaacttaatgccacttcgcatgtcttcatggtaccactattctgccctgtctcgctcaaccctacaacttccacgacatcgaaccagaacagctccgtggaagtgacaagtgctgcccccactcccaattcctccgaagacagagaacagaaaggtcattcaacgcagcacaaccccagagcagagcgcccggcgagtgatgagcctacgtcctccgcattctccaagaccgcttccccaagcgccacaccggccatctcacccaccagtccctcctccgtctcatcttccaacgtcgagtcagtttcaaatttcacttcccagacccagagctccaggacaacttcaacaccttcctcttcaacaaatccatctattgcaaaaccgtcgcctgccaatactgttaacgccaaaaagggcacgacgggcacagcttccggttcaccagcctcgccaacagtgcaagaaggcttcttcaaggccatatcaaaacgtctcatcgcagttgagactaacctcactctctccctgaagtacgtcgaagaccaggctcgccatatgtccgagacattgcaacgaacagagcaaaagcagatttcaaaagcaaacttgttcttcgaagagctcaaccgaactgtcgttgccgaactacgctccgctcgtgagcaatatgaccaaatctggcagtcaactgtgatcgctctcgaaagccagcgcgagcaatccaaccgagaaatagtagctctcagcagtcgtctcaaccttcttgccgatgaggtcgtgttccagaagcgtatggccatcgtgcaagcagtgcttctactgtcatgcctccttctcgtcatcttctccaggggtggatcgctgccttacctcgcgcctctcgtggatcaagcaaatctcgctcaatacgacactggatcacctgcagctcgtcttcgggcattgtacggtgacgtctacggcgcggacggacagagcgcagctttacttgctgcccgtcagagagtgtttgttcctatgacagaggcagcagatcatagtgattcaacagagcttcgacaacgttcgtcattggttgatgagatgcgtaatgagcaggccgagcgtgagcaactctcgccacctcaaacaccaagatctgccgacagctttttgtcctcatcgggtcgtttaccatcacctcgagagacccaaccaagtcttctgcgccatgctccagcaattcactcaggcaattcgcgtaaacccttgccggctttacctgagaaccctgcatcgccgtaa

SEQ ID NO: 6624 - protein, 903 aa, Gibberella zeae PH-1
MKGGEYRRRLKWGRGNHLVPIYYTKMFDVVHFSDRSPYVVKRVRIQLSYLEFNRFSFCAFLSHCVIAVAAYRSYMYRTNQHLTVQPPTSVSSCDARTINYITHTLPQSCLTISWTSSTTTSTPSLSNSTSDTSSDPAQSNAPSSSVLSDSQSQPQPSSTATPPKDESQDAAGDGAEKPFMSFEDWKELMLRKTGQDPQDLHARNTKPRDRTPPDMGHAGLGEEDEISLNFDSYLDNAGKQNEPPSDVDQAKGDGSAKAISIHRSKDAGKTCKERFSYSSFDAGATILKTSPGAKNAKAILVENKDSYMLLECSAKSKFVIVELSDDVLIDTVVLANFEFFSSMFRHFTVSVSDRYPVKMDKWKEIGLFEARNSRDIQPFLVPNPQIFSKYVRIEFLTHWGKEFYCPVSLLRIHGSRMLDSWKEADQARDDDSNPEEEAEETQQSLPSGEEAPKIQGAEKNPEPVKTTAMEKMPYCELNATSHVFMVPLFCPVSLNPTTSTTSNQNSSVEVTSAAPTPNSSEDREQKGHSTQHNPRAERPASDEPTSSAFSKTASPSATPAISPTSPSSVSSSNVESVSNFTSQTQSSRTTSTPSSSTNPSIAKPSPANTVNAKKGTTGTASGSPASPTVQEGFFKAISKRLIAVETNLTLSLKYVEDQARHMSETLQRTEQKQISKANLFFEELNRTVVAELRSAREQYDQIWQSTVIALESQREQSNREIVALSSRLNLLADEVVFQKRMAIVQAVLLLSCLLLVIFSRGGSLPYLAPLVDQANLAQYDTGSPAARLRALYGDVYGADGQSAALLAARQRVFVPMTEAADHSDSTELRQRSSLVDEMRNEQAEREQLSPPQTPRSADSFLSSSGRLPSPRETQPSLLRHAPAIHSGNSRKPLPALPENPASP

SEQ ID NO: 6625 - DNA, 1701 bp, Kluyveromyces lactis NRRL Y-1140
  CDS (1)..(1701)
atgagatatctagtatttcttttggtgctatttcttggggtgaattgtgagggagatagtgtactattttcatctgcaactgatgtatttgaaagacccaaaccgttgaaagtcacgacggctttagctacgaagaattcaaacaaaagcagacctttacaagtgtctatgtcatcaaccataaggaatgtgcctttagctactcaaggcaaagacagttcagtctttaaatctttcaatgagtggaataaagagaaactgcgacaaaacaaattagcacaacaagagagaccaaaacgttcattatttcataataacaataacggtgatgttataagagacgaactagaaatggactttgagatttttaatgatgatgagcccgaagggaaaatctacaaggataaatttaactatgcatcggttgattgcgcagcaacaatcataaaaacgaattcagaagcacaaggagctgtctctattcttttcgaaaacaaggacaaatcacttctaaacccatgctccgttccgaataagttttttgtggttgagttatgtgaggatatcttaattgaaagcattgtgatggctaactttgagttcttttctagtacgttcaaaaatgttagattctccgtggcagaacgattccctgtaccaaaaaatggctggaaggttcttggagaatttgaagctgagaatattcgtaatactcaacagtttacaattacgaacccaatgatctgggcaagatatttgagagttgaagttttatctcattacggagaggagttttattgcccaatcactctcattagggctcatggtattgcaatgattgatgaattcaaaatggaagtccaaaacgcaggcgagaaactcgaagaagtggtctcaattgagcaaaaactggcggaggaaaaagaaaagtgcatgataccaagttcattcttaactaataacatgtcaataaactttgacctagacatcaaccatcagtgtttagcatccttaaagcacatgaattttgatgaatttttcactggttataaggacaatgaaaatatcactcaagcaaaagattcatcttcatttatcccgataaataccgaagaatcaatcttcaagaatattatgaaacggctttcaggtcttgaaactaacggcactatgtctattctttatatcgaggaacaaagcaaattattatcgaaatccttcgataaattagaagattcatatagtcaacaatttgaagcattggttaaagcattcaacgaaactatgacctcgaatctggagaaccttaatcaattcgctttgcagcttagagaaagttcaattaaaattattgaagaacaaagattggctacggataaatttatctcaacaacgacgaataaagttgaggaactcgaaaatgcatatcaacaccaagctcgagttatgtatttaatccttttcggtctaatttcgtcgataatatatatttccctgactagagaatcctattttgaagaagaaatggttgatgatggttggtataccgacaactcttcacttcaaaagctcaaaaataatataaaaagatctgtgtcagaaacaaaaggccatccgtacacggaagctgctcattactcacctatatcttccgactctgaatttgaagatgaggacagcatcgtaatacctgccaaataa

SEQ ID NO: 6626 - protein, 566 aa, Kluyveromyces lactis NRRL Y-1140
MRYLVFLLVLFLGVNCEGDSVLFSSATDVFERPKPLKVTTALATKNSNKSRPLQVSMSSTIRNVPLATQGKDSSVFKSFNEWNKEKLRQNKLAQQERPKRSLFHNNNNGDVIRDELEMDFEIFNDDEPEGKIYKDKFNYASVDCAATIIKTNSEAQGAVSILFENKDKSLLNPCSVPNKFFVVELCEDILIESIVMANFEFFSSTFKNVRFSVAERFPVPKNGWKVLGEFEAENIRNTQQFTITNPMIWARYLRVEVLSHYGEEFYCPITLIRAHGIAMIDEFKMEVQNAGEKLEEVVSIEQKLAEEKEKCMIPSSFLTNNMSINFDLDINHQCLASLKHMNFDEFFTGYKDNENITQAKDSSSFIPINTEESIFKNIMKRLSGLETNGTMSILYIEEQSKLLSKSFDKLEDSYSQQFEALVKAFNETMTSNLENLNQFALQLRESSIKIIEEQRLATDKFISTTTNKVEELENAYQHQARVMYLILFGLISSIIYISLTRESYFEEEMVDDGWYTDNSSLQKLKNNIKRSVSETKGHPYTEAAHYSPISSDSEFEDEDSIVIPAK

SEQ ID NO: 6627 - DNA, 2004 bp, Debaryomyces hansenii CBS767
  CDS (1)..(2004)
atgattatcaatgataacagattgactttcttggcgattcatttattcataacatttcagattacaagagcagaattattacaaacgtcccaaagttcatgcctaactaaatctgtttgcaatgtagactcatgtttactagacgctggaaatatctttaaacctcaaaccagtctttcgaaaatagattcacttaattacactactccttcggcacccaaatctacgcaaatatctacgtcaacacccccatcgacgtcgatatctacatcaatatcaacagtcctatctacattaacttcaatcatatccacaacatctgctgaagtaatttcaagtttacctgaaaattccgttgtttcaagttctgaggatttgttcaccgaaataagcaagtctgacagtggtataataacagacgatttaaataatgcacacttcgaggtcaccagtgatgtaaactctacaaattctacaaatacaactgagccgtttatacccgtgcaaaattatacgaataagaatattcagcttaatcaatctaacgagactattgacgaatgccactttctatcgttcgaagaatggaaacgtcaaaaagctgttgataataaacagattaatgattctcaacctcaagcagaaacgatagcaaatgagttagttcctacaactagcggtatagataatagtacccaaatacccgtctcattggatgaagatcaaggaaagatatataaagatcgatttaattatgcatcagtgggttgtgccgctactattgttaaaactaactctcatgctaagggagcatcagcaatcttagtagaaaacaaggattcatatttattgaatcagtgttcttcatcacagaaatttgtggttattgaattatgtcaagatattcttgttgatactgtggtgatcggaaattttgaattctttagttcaaactttcgtaaaatacggatttctgtttcagacaggtttcctgttggatcttctggaatgaaagttttaggtgaatttgaagcagagaatataagagatgttcaatctttcaatatcgaaaatccacttatttgggcgaggtatttaaaattagaaattttgagtcattatggtgatgaattctattgtcctatatcactcattagagtttatggaaaaacaatgatggaagaattcaagatggcggaaggacatgaatctttcattggtggagaacctgaaattaagaatgaggaattagtaataaataattctatgaaagatatttcaaatttcacaggtattaatattcagaatgaggaatgtagagtggctttacctcatttaggattgactgaatttttaaaagatattaactcaacagctagtgattactgtgatgcaatgtatccattaataaatgagccggaaactacacaaacaatagaaactaagacaacacaggaatcaatctataaaaatataatgaaaagattatctcttttagaatcaaatgctagtttatccttactatacatcgaagaacaaagtaaattgctttctcaagcttttacaaatttagaaaagcgacagtcatcaaattttgaatcgttaattaattcatttaatgacaccatgcataaccaaatatcctatttcaagaacgcatattttagtatccaagttgaggcatccaaattattcaaggcccaggaaaataatcatcaaagtttgcttgaagaatcacatcataaaatgacaatattaggaaatcagttaaagtttcaaaaaagactttcaattttgaatactatgattatcatctgtatcttatcttatgttgtactcactagagatgtttacatagaagatcacatgtatgatcatttccaacagccacttcgaacttcgcagaatacctctggttattcaaatctacttgataaatacaagaggaaaaattctaagcgaaataacagaagtaagagaaggaagccaaaatctacgaattaa

SEQ ID NO: 6628 - protein, 667 aa, Debaryomyces hansenii CBS767
MIINDNRLTFLAIHLFITFQITRAELLQTSQSSCLTKSVCNVDSCLLDAGNIFKPQTSLSKIDSLNYTTPSAPKSTQISTSTPPSTSISTSISTVLSTLTSIISTTSAEVISSLPENSVVSSSEDLFTEISKSDSGIITDDLNNAHFEVTSDVNSTNSTNTTEPFIPVQNYTNKNIQLNQSNETIDECHFLSFEEWKRQKAVDNKQINDSQPQAETIANELVPTTSGIDNSTQIPVSLDEDQGKIYKDRFNYASVGCAATIVKTNSHAKGASAILVENKDSYLLNQCSSSQKFVVIELCQDILVDTVVIGNFEFFSSNFRKIRISVSDRFPVGSSGMKVLGEFEAENIRDVQSFNIENPLIWARYLKLEILSHYGDEFYCPISLIRVYGKTMMEEFKMAEGHESFIGGEPEIKNEELVINNSMKDISNFTGINIQNEECRVALPHLGLTEFLKDINSTASDYCDAMYPLINEPETTQTIETKTTQESIYKNIMKRLSLLESNASLSLLYIEEQSKLLSQAFTNLEKRQSSNFESLINSFNDTMHNQISYFKNAYFSIQVEASKLFKAQENNHQSLLEESHHKMTILGNQLKFQKRLSILNTMIIICILSYVVLTRDVYIEDHMYDHFQQPLRTSQNTSGYSNLLDKYKRKNSKRNNRSKRRKPKSTN

SEQ ID NO: 6629 - DNA, 1470 bp, Oryza sativa (japonica cultivar-group)
  CDS (1)..(1470)
atgccgctggaggcctacattttcccgaccgagtataacgcctccgcggccgcgcccacgtgccagccatcgttgcacccgccggatcagccgcagcaggaaactgaccaccggagcctggagccgttcaacaacacaaccggcggcaaatcgtcagcggaggcggcggcgctcgatgagctcgacgagttccggagccggatcctgcagggcaaggccgagaacggccgcgtccccgacggcgcgacgccggcggcccaccggctggagccgagcggcgcggagtacaactacgcggcggcgtccaagggtgccaaggtgctcgcccacaacagggaggccaagggcgccgccaacatcctcggcggcgacaaggaccggtacctgcgcaacccgtgctccgccgacgacaagttcgtcgacgtcgagctgtcggaggagacgctggtgcgcaccatcggcctcgccaacctggagcactactcctccaacttcagggacttcgagctgtacggcagcccgagctacccggcgccggcggaggagtgggagctgctcggccgcttcaccgccgacaacgccaagcacgcgcagcgcttcgtgctgccggacccccggtggacgcgctacctccgcctccgcctcgccacccactacggctccggcttctactgcatcctcagctacctcgaggtgtacggcatcgacgccgtcgagcagatgctgcaggagatcatctccggctccggcgccgacaccgacgcctccgccgccgccaaggccgaagagggcggcgacggcggcaccctccgcaacgacaccgcgcaggtcaacgcaaggctggacggcgtgggaggaggaggaggaagcgccgccggccggaacgacagcgccggcgacggcgcgggcgccaagaacaacggctcgaggatgacggtggccggcgacgggaagccggccgcggcggggcggttccacggcgacgccgtgctcaagatcatgatgcagaagatgcggtccctggagctgggcctctcaacgctggaggactacaccaaggcgctcaaccaccggtacggcgccaagctgcccgacctccacaccggcctctcccagacgaccatggcgctcgacaggatgaaggccgacgtccgcgacctcgttgagtggaagggcaacgtgaaggcgctacggattcttgatgagaattgttgtgttgggtgcaggtcgaatgtcgaggagatgaggagcatccaggagacgatgcagaacaaggagctggccgtgctgtccatcagcctcttcttcgcgtgcctggcgctgttcaagctggcgtgcgacagggtgctgttcctcttcaccaggaagggggcggcggcggcggagaggatgtgcggggcgagcaagggctggatcctcgtactggcaagcagcagcttcactactttcctagtgctgctatacaactga

SEQ ID NO: 6630 - protein, 489 aa, Oryza sativa (japonica cultivar-group)
MPLEAYIFPTEYNASAAAPTCQPSLHPPDQPQQETDHRSLEPFNNTTGGKSSAEAAALDELDEFRSRILQGKAENGRVPDGATPAAHRLEPSGAEYNYAAASKGAKVLAHNREAKGAANILGGDKDRYLRNPCSADDKFVDVELSEETLVRTIGLANLEHYSSNFRDFELYGSPSYPAPAEEWELLGRFTADNAKHAQRFVLPDPRWTRYLRLRLATHYGSGFYCILSYLEVYGIDAVEQMLQEIISGSGADTDASAAAKAEEGGDGGTLRNDTAQVNARLDGVGGGGGSAAGRNDSAGDGAGAKNNGSRMTVAGDGKPAAAGRFHGDAVLKIMMQKMRSLELGLSTLEDYTKALNHRYGAKLPDLHTGLSQTTMALDRMKADVRDLVEWKGNVKALRILDENCCVGCRSNVEEMRSIQETMQNKELAVLSISLFFACLALFKLACDRVLFLFTRKGAAAAERMCGASKGWILVLASSSFTTFLVLLYN

SEQ ID NO: 6631 - DNA, 1884 bp, Yarrowia lipolytica CLIB99
  CDS (1)..(1884)
atgaacctctggaaactggtcctcacggcggggttggtgatgtgcgagtctcaggccggccaaccgacgccgtcgcacccggccccgacgctgcgatcgttcgaagagtggcgaatacacaacctgttgcagagcgggcagaaccttggatcgacgccaggaagcggtcccggacacagtaacggcggtggtggaggcagcgagccggaaatggacccgttcacgggcgaaatcgactttctcttcgcggcgtccgacgacccgggcaagacctacaaggatcggttcaactacgcgtcgttcgactgcggagctacggtcgtcaagagcaacaaagatgtcaagggagcaggggccattctcgtggagaacaaggactcgtacctactcaacaaatgtgtggccggcagcaaacatgtgatcatcgagctgtgccaggacattctcgtcgaccaggtggtggtcggcaactacgagttcttctcgtccatgttcaaagacatccgaatcagcgtggccgatcgataccccgtggcatctggagaatggagagtgcttggtgactttacagccgacaatatccgagatctacagacttttgacatcaccgttcctcagatctgggcgcgatacgtcaagatcgagttcctctcacactggggacacgagtactactgtcccatatctgtggtcagagtccatggaaccaccatgatggaggaatggaaacgcagtggaggagatggtgacattgtcgcgggcgaaaagctggacgaatctcttcaggaagaaacggctcagtttgaaaaggctgaggagacgctccatgaagagaagatgatccaggagaatgtggttgagaagtccaacccttcgctgaaccataccgtcatcgaaaagggcgaatgcacccccaaactgtcgctggacaaggtcaaactgggcctcaacgaatactgccgtttggatgagttctaccgcaagattgaacgtaacaacagcaataacaacaccgataccaccaccaacaaccaatctaacaactccacaacaactccaccgactcaagagtcaatctacaagactatcatgaaacgtctgtctctacttgagtctaacgcaaccctctctcttcagtacgtcgaggagcaatccaaggtgctcagagacttgttgtacaagattgagaagaagcaaaactccaagattgacgactttttgttccatttcaatgccaccgtgctgcaacagctagtcatgttctctcaacaacgagaacagaagctcaatagagccatccttgagcttgatctgcaaaagagccaaacagacaagaacatggctgccatttcgcaacggtttgccatgctggccgatgatcttgtctttcaaaaacgaatgtccatgttccagggtctcatccttttggtggtgctcatctttgtggctctgactcgaggtaccggtcccgagttatctcgaagatcacgattgatgttcaatacagacgactcggaagacaactctgactttgggtccttcagacgccatctgagacgcaacttcaagcgaaatatcagcagtttgtctcccagatggtcgctgaatctcactcctcagtcccctgtgagtgatgatggagtggatgagggtctgggactcgatagcgacagtgaagacgagcatatcgagtccccgccacctcccaggactcttggaagtcctctagctactccgggacccaaaaagaagaagtcccgttcgttatatgatgagcctgttcagtgggcaggagatacccctgagccggtggactacatgagtcctgccgaagatgatgacgacaaaaaggaccacaggcgcgaccgcaacaaagaagaatga

SEQ ID NO: 6632 - protein, 627 aa, Yarrowia lipolytica CLIB99
MNLWKLVLTAGLVMCESQAGQPTPSHPAPTLRSFEEWRIHNLLQSGQNLGSTPGSGPGHSNGGGGGSEPEMDPFTGEIDFLFAASDDPGKTYKDRFNYASFDCGATVVKSNKDVKGAGAILVENKDSYLLNKCVAGSKHVIIELCQDILVDQVVVGNYEFFSSMFKDIRISVADRYPVASGEWRVLGDFTADNIRDLQTFDITVPQIWARYVKIEFLSHWGHEYYCPISVVRVHGTTMMEEWKRSGGDGDIVAGEKLDESLQEETAQFEKAEETLHEEKMIQENVVEKSNPSLNHTVIEKGECTPKLSLDKVKLGLNEYCRLDEFYRKIERNNSNNNTDTTTNNQSNNSTTTPPTQESIYKTIMKRLSLLESNATLSLQYVEEQSKVLRDLLYKIEKKQNSKIDDFLFHFNATVLQQLVMFSQQREQKLNRAILELDLQKSQTDKNMAAISQRFAMLADDLVFQKRMSMFQGLILLVVLIFVALTRGTGPELSRRSRLMFNTDDSEDNSDFGSFRRHLRRNFKRNISSLSPRWSLNLTPQSPVSDDGVDEGLGLDSDSEDEHIESPPPPRTLGSPLATPGPKKKKSRSLYDEPVQWAGDTPEPVDYMSPAEDDDDKKDHRRDRNKEE

SEQ ID NO: 6633 - DNA, 4287 bp, Aspergillus nidulans FGSC A4
  CDS (1)..(4287)
atgctggcaccccggtggcttacgacggcgattttcgtgttgacctatattcaaaaatccggcggtgactctcagaaacaacccgtatgccttgcaagggactggagggaagccgtagttcctctgaaatggcccacctgtgttgaaacgcgttgggatcgatggccgaacggtgaactgacgacgacaccgacaccagcatctcataataacctgaaatctaccagcggatcaagctcggtctcggtctccataacggtagagccaggtccagcgtcctcgttggcggatcatgaattggataccgagtcaccgctcgacaacgtgaactttctctcttttgaagactggaaaaaacaaaatctcgctagggcaggacagtcggcggagaatatcggcggcaaccggcgggccgggaccgcagagaaggaccgtcgacgacctttaggtataaacaatgcgctcgactctctaggagacgatgtggagattgagcttgactttggcggctttggggccgatgcgtcagaggctgcaaaaaccgcgactgactgggttactcatgttccttcgcgtggaagcggcggggcacaagtagtcccggatggaggccgtgacacggccgaggcttctgggcagggtgttcctcatgcaggaggtgagcggtcaaaagatgctggcactacttgcaaagaacggttcaactacgcgtcttttgactgcgccgcaacagtgctcaagacaaaccccgaggcgaaaggatcgtcgtctgtcttgattgagaataaggatagctatatgctgaacgagtgtcgtgcacagaataagtttttgattctcgagctatgcgatgatattctggtggatactgttgttctcgccaactacgagttcttcagctcgatcttccacactttccgcgtcagtgtcgcagaccgctaccctgcgaagccagagcaatggaaggagctcgggatttatgcagcgaggaatactcgcgagatacaagccttcgcagttgagaacccgcttatttgggcgcgatacttgcgaatcgagtttctaacgcattatggaaacgagttttactgtccgcttagtttaattcgtgttcacgggacgacaatgttggaagaatacaagcacgatggagaggtgaatagagctgaggaagaattagctggaggtgtggcagaaccagctttagagacagagactgtcacggaagatgccacgaagactgaagtgccgccgccggaggcaccaagttttcacgtcgtcaactctgaaatacgcccgtcaaaaatatgtccgaaatttgttactagtgttgagctggcattgctcggttcagtgaatcctcaaacgtgtggcatcaatgacacctcggaagagtcgcccgcgactgaagggaataagccagtgcttagcaaaacttcatcaagtccagttataccttcagctggcaatgctgccaaggctgcttctcctgaggctggagattataaagcctcaggctcttctggtgtcaatcctcctaatactgcggatactgccgcctccggtgcggcttcgtcagaaacagattctcacaatgccacttctgaccaagatactcgttctacagctgcctctagagatgagcagggtgttgagtcaatacgaacaactacaacgcaaccgccgtccgcaaacccgacaacacaggaatcttttttcaaatcggtcaacaagcgcctgcaaatgctggaaacaaactcaagtctgtcattacaatacattgaagagcagtcacggattttacgagatgcattcaacaaggttgagaaaagacagctttctaaaacctccacgtttctggaaaacttgaatgtgaccgtggtcaatgaactaaagcagcttcgtgagcaatacgaccaggcgtggagaagcgtagcgctggaatttgagcatcagaggattcagtaccatcaagagatacactccctgagtgctcagctcggagttctcgctgatgagatagtgtttcaaaaacgagtggctgttattcagagcatcgtggtgcttctctgctttggtcttgtgcttttcacccgcggcgcagttggcagctacattgactttcccagcgtgcaaaacatggtctcacggtcatacagtctacggccttcctcgcccatcttggggttcgggtctccccctggaagccccggttcgacgcgaccgacatcatcttatcgtaccacccccggtcatcgtcgacaggtctcacaagactcacaggacgggtcagtcagtccaactatgtatgcccctccaaccccaacttcggacgactcgagactaggaccagacgaacgagggactacatctccatccccggagggagctcggtcattagctgaggtcgcacccccgttgctaagatcgaacagtagcccacccgatttgaacggagaaaatgaaggagggtgcgagaaaaaccacgaggacctggactctgacccagaatgttctggctttgaaactgggggcgatgacacgttggcagaatcgccggtaactgtcatgatgcaacaatttcaatgcccgacaactaaagaaacttcaatcacaagcctcaaaatgaactctaacccgctgactgcccgctcgcccaacacccacctcgccgtttccaacgagcaggacctgaagaccgcatcatcaaccaccgatctgatggactaccaccgtcagaaactacaggggaagattgagaaccaagacaaacaacaagcaagttacgtctctccatccgacgacatcatgagtccttgttcgaagaagttgagcgatctcaagggaaagcgatttaaaaatgtagagcaagacggtaaaggtgatgaattccccctatcgctcaacccttcgtcagcgaccgggccaagaagaccctggatctggtacttccccgcaccattaccccggcttgcggcctccactccgaacaaccaaaagtctaaccaacaagatcaggtcgaagaattcgtcgagaaagaatgcatccccgccgaagctcttttttccgcgcagctcggcaccggtgagcaacgatggaagaccaaccctgccgtcatggaggagctcaagacaaaggcgaagaagattggtctatggaacatgttcctccctaaaaaccacttctcgcaaggtgctgggttcagcaatcttgagtatgggcttatggcggagtacctggggaagagcaaggttgcgagtgaggctacgaacaatgccgcgcctgatacgggtaacatggaggttttggccaagtacggcaatgaccaacagaaggcgcagtggttgacgcctctgctggagggaaaaatccggtctgcgttcctcatgacagagccagatattgcttctagcgatgcgacgaatatccagcttgacattcggcgcgaagggaatgaatacgttctcaatggctcgaaatggtggtcctcaggtgccggagacccccgctgccagatctacctcgtcatgggcaagaccgatcctcgcaacccagacacctacaagcagcagtccgtccttctggtacctgcatccacacccggcatcaccatccaccgcatgctcagcgtctacggctacgacgacgcccctcatggccacgggcacatctccttcaagaacgtccgcgttccgctatccgccatggttctcggcgaaggccgcggcttcgaaatcatccaaggccgcctaggacctggccgtattcaccacgccatgcggacaattggcgccgccgagcgcgcaatcgactggctcattgcacgtatcaatgatgaccgcaagaaaccctttgggcagccgctctcctcacatggggtaattctcgagtggctcgccaagtcacgtatcgaaattgacgctgcgcgtctgattgtgcttaatgcggcgattaagatcgaccagggcaatgctaagtttgcgcttaaggagattgcgcaggcgaaggtgttggtcccgcagactgcattgacggttatcgatcgtgctgtgcaggtgtatggcgctgcgggtgtgagtcaagatacgccgctggcttctctgtgggcgatggtgaggacgctgaggattgcagacgggccggatgaggtgcatttgcagcaacttggaaagagagagaacaagtcgagacgggaggaggttacaaagagagtggcttggcagaaggagcagagtgacaggatcttgactgcgaatgggttctcgaagttgaagagtcttctctag

SEQ ID NO: 6634 - protein, 1428 aa, Aspergillus nidulans FGSC A4
MLAPRWLTTAIFVLTYIQKSGGDSQKQPVCLARDWREAVVPLKWPTCVETRWDRWPNGELTTTPTPASHNNLKSTSGSSSVSVSITVEPGPASSLADHELDTESPLDNVNFLSFEDWKKQNLARAGQSAENIGGNRRAGTAEKDRRRPLGINNALDSLGDDVEIELDFGGFGADASEAAKTATDWVTHVPSRGSGGAQVVPDGGRDTAEASGQGVPHAGGERSKDAGTTCKERFNYASFDCAATVLKTNPEAKGSSSVLIENKDSYMLNECRAQNKFLILELCDDILVDTVVLANYEFFSSIFHTFRVSVADRYPAKPEQWKELGIYAARNTREIQAFAVENPLIWARYLRIEFLTHYGNEFYCPLSLIRVHGTTMLEEYKHDGEVNRAEEELAGGVAEPALETETVTEDATKTEVPPPEAPSFHVVNSEIRPSKICPKFVTSVELALLGSVNPQTCGINDTSEESPATEGNKPVLSKTSSSPVIPSAGNAAKAASPEAGDYKASGSSGVNPPNTADTAASGAASSETDSHNATSDQDTRSTAASRDEQGVESIRTTTTQPPSANPTTQESFFKSVNKRLQMLETNSSLSLQYIEEQSRILRDAFNKVEKRQLSKTSTFLENLNVTVVNELKQLREQYDQAWRSVALEFEHQRIQYHQEIHSLSAQLGVLADEIVFQKRVAVIQSIVVLLCFGLVLFTRGAVGSYIDFPSVQNMVSRSYSLRPSSPILGFGSPPGSPGSTRPTSSYRTTPGHRRQVSQDSQDGSVSPTMYAPPTPTSDDSRLGPDERGTTSPSPEGARSLAEVAPPLLRSNSSPPDLNGENEGGCEKNHEDLDSDPECSGFETGGDDTLAESPVTVMMQQFQCPTTKETSITSLKMNSNPLTARSPNTHLAVSNEQDLKTASSTTDLMDYHRQKLQGKIENQDKQQASYVSPSDDIMSPCSKKLSDLKGKRFKNVEQDGKGDEFPLSLNPSSATGPRRPWIWYFPAPLPRLAASTPNNQKSNQQDQVEEFVEKECIPAEALFSAQLGTGEQRWKTNPAVMEELKTKAKKIGLWNMFLPKNHFSQGAGFSNLEYGLMAEYLGKSKVASEATNNAAPDTGNMEVLAKYGNDQQKAQWLTPLLEGKIRSAFLMTEPDIASSDATNIQLDIRREGNEYVLNGSKWWSSGAGDPRCQIYLVMGKTDPRNPDTYKQQSVLLVPASTPGITIHRMLSVYGYDDAPHGHGHISFKNVRVPLSAMVLGEGRGFEIIQGRLGPGRIHHAMRTIGAAERAIDWLIARINDDRKKPFGQPLSSHGVILEWLAKSRIEIDAARLIVLNAAIKIDQGNAKFALKEIAQAKVLVPQTALTVIDRAVQVYGAAGVSQDTPLASLWAMVRTLRIADGPDEVHLQQLGKRENKSRREEVTKRVAWQKEQSDRILTANGFSKLKSLL

SEQ ID NO: 6635 - DNA, 3768 bp, Danio rerio
  CDS (1)..(3768)
atgagagctcggatgcactcttgtcatgatgtttattgttcagaagaggtctcctctggcccaggactccctgcacaggatgacggcagttacacaatgcaggaaccaggggctggcgaaaagactgtgaatttggaagaggtgctggaggagccacagattcagcatgactctgctctcccagagctagaacaacaacaacaacaagagcagcacccggaaggccagagctcacaacatccagaccaacaagattcagctcaaccaccaacatttgcacagcctgaaacagcaccgccactttcccaacctgacccagaagttccacaggccactgccacagaggaccaggccgcacagccctccactgatgaaaccccgccacatcctgacccacacgctgaagaagatgcctctgcacctgcagatgaactccagaacagcccagagtccacctcacctacctcagtcacctcctctgagagcctctccagtggactagacgtcccacgtcctgatgccgctgtagagaactctagtgccagtcagtgtgaggtgggctctgtgcccccattcagccaacagcttggcacaacgctcaccagtgttgtggaggaacaagtggagacccaagcagagaaccagtccaccgtgttggaacagagtacggagaccagtactgatccggctgactccctggacccaagtgagctggacctcacagagacagggcagacagaccgtattcctccacctacggaaagccagcaggtggcggatcatgaaggagcgacagaccctcctgtacccagtaaagaagacatccctaccttcgatgagtggaagaagaaagtgatggaagtggaggagaagaaaagtcagtctctgcacacttcatcaaatggcagccctcatccagtcaaaaaggtccaaaagaatttcaagaataactacgcttccgtcgaatgcggggccaaaattctttcggccaacaacgaggctaagagcacatctgccatcctgatggagaacatggatctgtacatgctgaacccctgcagtaccaagatctggtttgttatcgagctctgtgagccaatccaggtgaagcagctggacattgcaaactttgagctgttctcatccacaccaagagacttcctcgtgtccataagcgacaggtatccgactaataagtggatcaagctgggcacgtttcacgcccgtgatgaacgcacagtacagagctttcccctagacgagcaactctatgccaaatatgtgaagggcgcgctggactgggaaacaatgcacaatgacattatcagcagcaagatgttcttggagctctttgaagaaagcctggtgtttggcaccagtatggtggaggagtatgatgagattgcagactctcagtacacgtcagagagagctgaatatctggatgaagattatgattacccacccggctacctgccgtcagaggacaaggcatcaaagaatctgctgggctctgccacaaatgccatcctgaacatggtaaacaacatcgcagcaaatgtgctcggaggcaaaccggagctggaagacggagctgaactggaaggaaatgtttcctctgggaccgaaaacgtcacacaggcatcaacagaaaccacacttacgccagatccgacccccactgaacagccccatacgctggatgttctggagttggatcccacgtttgtgaaggaggacatggaggctcctatacccgaggctccttcacaagctcctacagtagctcctgctgaggagagccgtattgtcattctcatcgaggaggatgaagagtccactcagccgacggtgaccctgctggaggaggaggcggcgttagcactgcagcgccagcgtaaagaccgccgccacaaagcccagcacacacaagcccacactaaaactcaaaccacctctcagcagaccctcaccgaccctacgccttcccaagaacctcctgcaccctcagagaaactatcagaagcagagcggccctcgcagacgcagtctgagaggatttctcctactgaaacggcagctgctccatctgaatcctccaactgggaatcttcatccacagagctggaacttccacctgagaccatccttttggagcccagccgcacctccaccctccctccacacagcttctctgaaacccccacccaaaacatcccggagtcccttcctacaggagagcctgttgaccagcgtccgcagtacctggtggacatccctgaaacccacgcccctgggagtgtttgcagcagcaccagcagtgttccgtctccctccgctgtctcctctacacccctctccagcaccactgaaccccacagcctagagacggaccctcccaaactggagctcccagttcccaccaaagagcagacagctcagccgttgcccactcacaccaggcctgctgaaatccctcctcctaccgaaattcccatcctgattccagaggcctccgaaaatggcaaggtctcattagttgaggaccaacaccacaatgctgtggtgtcccaaccagagctttctgaagccccacatgaggacacagttgatgatattctgctcccgcaccgcactgccggagagttttatgcagagcagcagcagacagccgaaatgggccacagtaatggaaacggcaatggtaatcaggtgcacgggtccaaccagaaagaatcagtgttcatgagactgaataacagaatcaaagcactggagatgaacatgtctctcagcagcagatacctggaagagcttagtcagaggtatcgtaaacagatggaggagatgcagcgggctttcaacaaaaccatcatcaagctgcagaacacctccagaatcgcagaagagcaggaccagaaacaaactgagtctatacagatgttgcagagtcagctggagaacgccaccaggatcatgctgaatctgtctgccacagttgcccagctgcagcgagaggtgtctgatcggcagatttacctggttctgtctctgatcctgtgtctgatgctgggtttgctgctttgtacacagtgctgcaggagctccaccaatcacaacaccagcccgaccattcccatgagcaacaactaccccagtcccaagaggtgtttttcctcatatgatgatatgagtctaaaacggagagtttcttgccctctggttcgttcaaagtcatttcagctgcctacgtctgaaggacccgatgacttgtacattgtagaacctctaaggttttctccagagaaaaagaagaagcgctgcaagacaaaagcaggagagcgcgtggagacgctccgggcctcagcgacggctcctaacggcctgctcaagctcaatggagaatcctcacctcctcttcagttcctgccgtcgacctgcaacggctacacgtccacctgctcgtccagagactgtgcttcagagggcagctccgagagctccgtgtccacactgtcagaggagtcgttcggcagcgccccttcagtgaacggacatgagcttgttctatataacggagagcctccgccagcctgccctccagccaagagcaggacggagaagaaacgccgccgctccagacagggagagcaggacagcatgctgagcgcatcgctgcccctgcccgcgctggaggagctcatcaagggcaagacggagctcggcgtagcctctttcggaaggacagcagtcacaggacgagtttga

SEQ ID NO: 6636 - protein, 1255 aa, Danio rerio
MRARMHSCHDVYCSEEVSSGPGLPAQDDGSYTMQEPGAGEKTVNLEEVLEEPQIQHDSALPELEQQQQQEQHPEGQSSQHPDQQDSAQPPTFAQPETAPPLSQPDPEVPQATATEDQAAQPSTDETPPHPDPHAEEDASAPADELQNSPESTSPTSVTSSESLSSGLDVPRPDAAVENSSASQCEVGSVPPFSQQLGTTLTSVVEEQVETQAENQSTVLEQSTETSTDPADSLDPSELDLTETGQTDRIPPPTESQQVADHEGATDPPVPSKEDIPTFDEWKKKVMEVEEKKSQSLHTSSNGSPHPVKKVQKNFKNNYASVECGAKILSANNEAKSTSAILMENMDLYMLNPCSTKIWFVIELCEPIQVKQLDIANFELFSSTPRDFLVSISDRYPTNKWIKLGTFHARDERTVQSFPLDEQLYAKYVKGALDWETMHNDIISSKMFLELFEESLVFGTSMVEEYDEIADSQYTSERAEYLDEDYDYPPGYLPSEDKASKNLLGSATNAILNMVNNIAANVLGGKPELEDGAELEGNVSSGTENVTQASTETTLTPDPTPTEQPHTLDVLELDPTFVKEDMEAPIPEAPSQAPTVAPAEESRIVILIEEDEESTQPTVTLLEEEAALALQRQRKDRRHKAQHTQAHTKTQTTSQQTLTDPTPSQEPPAPSEKLSEAERPSQTQSERISPTETAAAPSESSNWESSSTELELPPETILLEPSRTSTLPPHSFSETPTQNIPESLPTGEPVDQRPQYLVDIPETHAPGSVCSSTSSVPSPSAVSSTPLSSTTEPHSLETDPPKLELPVPTKEQTAQPLPTHTRPAEIPPPTEIPILIPEASENGKVSLVEDQHHNAVVSQPELSEAPHEDTVDDILLPHRTAGEFYAEQQQTAEMGHSNGNGNGNQVHGSNQKESVFMRLNNRIKALEMNMSLSSRYLEELSQRYRKQMEEMQRAFNKTIIKLQNTSRIAEEQDQKQTESIQMLQSQLENATRIMLNLSATVAQLQREVSDRQIYLVLSLILCLMLGLLLCTQCCRSSTNHNTSPTIPMSNNYPSPKRCFSSYDDMSLKRRVSCPLVRSKSFQLPTSEGPDDLYIVEPLRFSPEKKKKRCKTKAGERVETLRASATAPNGLLKLNGESSPPLQFLPSTCNGYTSTCSSRDCASEGSSESSVSTLSEESFGSAPSVNGHELVLYNGEPPPACPPAKSRTEKKRRRSRQGEQDSMLSASLPLPALEELIKGKTELGVASFGRTAVTGRV

SEQ ID NO: 6637 - DNA, 1677 bp, Candida albicans SC5314
  CDS (1)..(1677): transl_table=12
atgatatatatttggcatgcattagtctatatttcatgtctatcaagctgtgtcctctcgcaagaaaatagcctggacacactgacaagtttagtgaataaatccgacctatatacaccacgatcaaatcgaactttggactattctcctttaatacagtacattccagtctttttccaaaaaaattatagttccattgatactcctcataacaatgatttcctagcgttacaatctcctgcgactacacaaacagacagcaacaagaatctgcagaagaatgattccgtgcttgatgaatgtcatttcatgtcctttgaagaatggaaaaagcaaaaaatagaatccaatactactacatctaacaattactcaatgaatggatcatcagaatcgaaatctattacaccttcaaaccactcatcggttatatcaactaacgtcactttaatggaggccgacgggaaggtttacaaggacaagtttaattttgcatcggttgattgtgcagcaaccattatgaaaacaaatgcccaagctaaaggtgcatctgccattcttaaagagaataaagattcatacttgttgaatgaatgctccgtcaaacacaagtacgtgattattgagctatgtcaagatatacttgtcgatctggtagtaattggtaattttgagtttttttcatccattttcaaagatattagaatcagtgtaagtgatcggttcccatcacagaattggaaagagttaggacagtttactgcatccaatattcgtgatgtgcaaactttcaagatcgaaaatcctttaatttgggctagatacttgaaattagaaattttaagtcattacggcaatgaattttattgtccaatatcaatagtgagagttcatgggaagacaatgatggatgaattcaaagaagatgaggaagggaatcagcatatgggtgctataaaggaggaagagccaccaacaccacaaacaattgaagaagatgttttattaatcaatcagactacactaaatgaatgcagagttcgcttaccacatttacaattaaatgagtttttaaaatcgtttaatagttctaatcaagagttttgtgtaccaagcgacgccgagcctcaagtaaccacggcaaagacaactacagccatcactacacaagaatctatttacaaaaatataatgaaacggttatctttactagagtcgaatgctacattatctttactttacattgaagaacaactgaaattgttatcaactgcattttcgaatttggagaaaagacaaaccacaaatttcaacacgttaatcagttctgttaatagtactttaatgaatcaattaatggttttcaaagagtcttactatgagctatatgaacaatatgggaatctattcaaaatgcaggaaaacagtcacagacaattgttagcagaaacaaataaaaaagttgggttgttgtcaagtgaattgacattccaaaaaagagtctccattttcaatagtataattattatttgcttgttagtttatgtgattctcacccgtgacgttgccatagagtatccagaggacgagttgaacgaaaagtcacctctgcctcaatccaagaaactatcatcaccatttataccaataagatacaaaaagtccaaaaaacgttaa

SEQ ID NO: 6638 - protein, 558 aa, Candida albicans SC5314
MIYIWHALVYISCLSSCVLSQENSSDTSTSLVNKSDLYTPRSNRTLDYSPLIQYIPVFFQKNYSSIDTPHNNDFLALQSPATTQTDSNKNSQKNDSVLDECHFMSFEEWKKQKIESNTTTSNNYSMNGSSESKSITPSNHSSVISTNVTLMEADGKVYKDKFNFASVDCAATIMKTNAQAKGASAILKENKDSYLLNECSVKHKYVIIELCQDILVDSVVIGNFEFFSSIFKDIRISVSDRFPSQNWKELGQFTASNIRDVQTFKIENPLIWARYLKLEILSHYGNEFYCPISIVRVHGKTMMDEFKEDEEGNQHMGAIKEEEPPTPQTIEEDVLLINQTTLNECRVRLPHLQLNEFLKSFNSSNQEFCVPSDAEPQVTTAKTTTAITTQESIYKNIMKRLSLLESNATLSLLYIEEQSKLLSTAFSNLEKRQTTNFNTLISSVNSTLMNQLMVFKESYYELYEQYGNLFKMQENSHRQLLAETNKKVGLLSSELTFQKRVSIFNSIIIICLLVYVILTRDVAIEYPEDELNEKSPSPQSKKLSSPFIPIRYKKSKKR

SEQ ID NO: 6639 - DNA, 2715 bp, Aspergillus fumigatus Af293
  CDS (1)..(2715)
atgctttcgggccgatgtgtgggcgcatttctcattaatttagctgccctcgccctgcttacggctggacaagcggtaatacgggagcagtcacagccactatgcctggccaggggctggagggatactgaggccgagtttattcggtggccggtctgcatcgagacccgctggagtaggtcaggcattacggtcgctgggggaccttctgttacgatgtcttctatttcaagcaattcgccgccgactagcaaggccagccatacggctgtacaacaacattctggcaaggagcaggagcaggacacggattcccccctcgataatgccaagtttctctcctttgaagattggaagaagcagaatctggcaaaggttggccagtcggcggagaatgtggggggcaaccggcggagtggcgtgacagggaacgagagccgacggcctacggggatcagcaacgctctagactctcttggagaagacgcggagattgaacttgactttggtggattcggtgctgacgcgccagaggccgcacggccgccgtcatttggctcgggggtgcaggtggggaagagcgcagggtcggtggacagcaaaactggtggagatgcgaatggcccgtctcctgggatgatacggtcaggcagctcgcgtaggaaagacgctgggactacgtgcaaggagcgtttcaattatgcctcctttgactgcgctgctacagtgctcaagaccaaccccgagtgtcagggctcgtcttctgtgctgatcgagaataaagacagctacatgcttaatgagtgtcgggctaaaaataagttcctgattctcgagctgtgcgacgatatcttggtagacaccgtggttctcgcgaactacgagttcttcagttccatctttcataccttccgggtcagcgtctcggatcgatacccggccaaaccggaccagtggagagaactgggggtttttgaagccaggaattcccgcgaagttcaagctttcgcggtagagaacccgctgatctgggctcgatatctgaagattgagtttctgacgcactatggaaacgagttctactgccccctgagtctcatacgcgtccatggaacgactatgctggaggaatacaagcatgatggcgaggctagtcgagttgacgatgagattgttgacgagacattggagccggaccatgctgtcactgcagcgattgcagagccatccgaaaattcgtctgatcttggtgcggagaatcgtgaaagcatgcgcaggaaactgcaggatggactccaggatgcttgcccgaacccagcacaagggctggagaggcttctggcaaattacctagattcagagatatgcagtgtgcaggctagaccgacgagaactgctggccaagaaagagctgacgcagctgttcaacatgactcgccttcgacggacaccacgccaccgggaccggaggcctccgggcctattgtgcccggcgcaggtaatggtaccaaattcgcacctgatgctcgacgagctgctgggcagtctggagctgacggtaaccctttacccgcttcgatggcaaccatgtctgagcctgtccagcatgacaccacgtcggaagcagaccagaaatctacagcctcatcccaggaagaacaagttccttcagtagactcagccaagttctctgcaactcaaccaccatcacccaatccgaccacgcaggagtcgttcttcaaatctgtcaacaagcgactgcaaatgctggaatcgaattcgactttgtctcttctgtatattgaggagcagtcgcggatcctgcgtgatgcatttagtaaagtcgagaagcgtcagctgtcgaaaacatctaccttcctggaaaatctgaacgtgactgttatgaacgaactgagacagttccgcgaacagtatgatcaggtttggaagacggttgcgctggagtttgaaactcagcgcatccaatatcaccaggagatattctccttaagtgcgcagctgggtgtcctcgcagatgaacttgtcttccagaagcgagtcgctgtaattcaaagcatcatggtcctcttctgctttggcttggtcttgttctctcggggtgcaatgagcagctatatggagttcccaagcgtgcaaaacatggtgtctcgatcctacagtttacgatcgtcatctccaccattcagctcgccctccatgagtccgagttcaaccaggccgtcgttcacatatcgaagtcgccacaggaggaatggtacggacgacacgcaggatagtgcgccgagccccactatctcatactcgccgccaacgccaaactcagagacatcagtaccattagagtcgatagagaaacaggaatcaccaccatcccctggcgatcttgaattgccagacatcgaacttccccagttccggtcgcaaagcagccctcctgtcttgaagagtggcgaagacagcgacggcgaaatttcaaagacatccggatccatggaggtcgcatctgaaaaatccgcacctttgtatacaatggactccacacccaccgcccctctgaccgaccggtcaacaaacacccacctcgctgcgaaccaggacaaagtgaacgatctcaaaaccgcggcggcgaatctgaactcgatggagtaccatcggtcagttctgcagggtaaactgcagaacgaagataagtga

SEQ ID NO: 6640 - protein, 904 aa, Aspergillus fumigatus Af293
MLSGRCVGAFLINLAALALLTAGQAVIREQSQPLCLARGWRDTEAEFIRWPVCIETRWSRSGITVAGGPSVTMSSISSNSPPTSKASHTAVQQHSGKEQEQDTDSPLDNAKFLSFEDWKKQNLAKVGQSAENVGGNRRSGVTGNESRRPTGISNALDSLGEDAEIELDFGGFGADAPEAARPPSFGSGVQVGKSAGSVDSKTGGDANGPSPGMIRSGSSRRKDAGTTCKERFNYASFDCAATVLKTNPECQGSSSVLIENKDSYMLNECRAKNKFLILELCDDILVDTVVLANYEFFSSIFHTFRVSVSDRYPAKPDQWRELGVFEARNSREVQAFAVENPLIWARYLKIEFLTHYGNEFYCPLSLIRVHGTTMLEEYKHDGEASRVDDEIVDETLEPDHAVTAAIAEPSENSSDLGAENRESMRRKLQDGLQDACPNPAQGLERLLANYLDSEICSVQARPTRTAGQERADAAVQHDSPSTDTTPPGPEASGPIVPGAGNGTKFAPDARRAAGQSGADGNPLPASMATMSEPVQHDTTSEADQKSTASSQEEQVPSVDSAKFSATQPPSPNPTTQESFFKSVNKRLQMLESNSTLSLLYIEEQSRILRDAFSKVEKRQLSKTSTFLENLNVTVMNELRQFREQYDQVWKTVALEFETQRIQYHQEIFSLSAQLGVLADELVFQKRVAVIQSIMVLFCFGLVLFSRGAMSSYMEFPSVQNMVSRSYSLRSSSPPFSSPSMSPSSTRPSFTYRSRHRRNGTDDTQDSAPSPTISYSPPTPNSETSVPLESIEKQESPPSPGDLELPDIELPQFRSQSSPPVLKSGEDSDGEISKTSGSMEVASEKSAPLYTMDSTPTAPLTDRSTNTHLAANQDKVNDLKTAAANLNSMEYHRSVLQGKLQNEDK

SEQ ID NO: 6641 - DNA, 1401 bp, Arabidopsis thaliana
  CDS (1)..(1401)
  misc_feature (751)..(751): w is a or t
atgttaattaaggaaacaaatttagggtcttttaacttggggggtatattccagagattgctatattgtgttcctctgaagaaatcaatttattttgtagatagaattgggaattacactgatggatcagtctcaaagacactgaattccacgagttctgtcttccctcaggccactgagaaagaaaacaacttttgtctcctgagaaaaggccagttacaagatgtgtatgagcatgttcttgtgaacaacgctttgttgatctgcaaagttgtgttgccagaacgaagaataagcaagaaaactctggaagctcgtgatcctagatatgtcaatcttgaagacaagagtctcaaagttaatggctcatcacagcttgtgaataatgggactcgttataggttagaaccagatggaaatgggtataactacgcttctgctatgaagggtgctaaagttgtggatcacaacaaggaagcaaaaggagctagcaatgtgcttggcaaagatcatgataagtatctaagaaatccctgttcagtgtcagataagtatgttgtgattgagctcgccgaggagacactggttgatacggtgagaattgcaaattttgagcattactcttcgaatcccaaagagtttagcttgtcagggagtctgagtttccctagtgatatgtggacacctgctgggagttttgcggctgcaaacgttaagcagatccagtcattccggctcccggaacctaaawggacagatcagattggcaaagaaactgaagctcagaagaagaaagatgatgttgtgaagacgattaatatcataggagacaaaaagtatgaagtcaaggagaagcataacgttttgaaagtgatgatgcagaaagtgaaattgattgagatgaatttatcgcttcttgaggattctgtaaagaaaatgaatgacaaacaaccagaggttagcttggagatgaagaaaaccctagtacttgtggagaaaagcaaagctgacatcagagagatcacagaatggaaagggaaaatgaaactaccaatgaatttgatattctttgagcaggaaaaggaacttagagacctagagctatggaaaactcttgtagcttcccgtgtagaatcattggctagaggaaactctgcattgagattggatgtagagaagattgtgaaagaacaagctaatctagagagtaaagagctgggagttctattgataagcctctttttcgtggtcttagcaacgattcggttagtctcaacacgactctgggcatttctggggatgtctattacggataaagctcgatcactatggccggatagtggctgggtcatgatactgctaagcagcagcatcatgattttcattcatttactctcttag

SEQ ID NO: 6642 - protein, 466 aa, Arabidopsis thaliana
  misc_feature (251)..(251): The Xaa at location 251 stands for Arg, or Trp.
MLIKETNLGSFNLGGIFQRLLYCVPLKKSIYFVDRIGNYTDGSVSKTLNSTSSVFPQATEKENNFCLLRKGQLQDVYEHVLVNNALLICKVVLPERRISKKTLEARDPRYVNLEDKSLKVNGSSQLVNNGTRYRLEPDGNGYNYASAMKGAKVVDHNKEAKGASNVLGKDHDKYLRNPCSVSDKYVVIELAEETLVDTVRIANFEHYSSNPKEFSLSGSLSFPSDMWTPAGSFAAANVKQIQSFRLPEPKXTDQIGKETEAQKKKDDVVKTINIIGDKKYEVKEKHNVLKVMMQKVKLIEMNLSLLEDSVKKMNDKQPEVSLEMKKTLVLVEKSKADIREITEWKGKMKLPMNLIFFEQEKELRDLELWKTLVASRVESLARGNSALRLDVEKIVKEQANLESKELGVLLISLFFVVLATIRLVSTRLWAFLGMSITDKARSLWPDSGWVMILLSSSIMIFIHLLS

SEQ ID NO: 6643 - DNA, 1920 bp, Arabidopsis thaliana
  CDS (1)..(1920)
atgttaagaaccaactcttgtgtacttgtagatgagcctttgaacgactctatgggaatggctgatccggatgatggtcagtcagatgagaaagttgtgccctttgatggaccattatccttagcgtctgcttctgttgatgttacgtctgatttgagtcggaatgatgatgtaaacctgtctgaagaaagtgaagacaaagaacaggaagcagagatcagtagcacagtttcagggaatgatattgaaagcaaggacacttaccttttgaagcaaagtgagataaataagaaagatacagggattgatgcaggaagcaaatatgatgactttcccaagaaaagtgagattaacaatacaggtacgtggaatgatacagaaggcaaagacgataataactttttgaagcaaagtcaattgaacaagacaggcacagggaatgatacagaaagcagtgacaatgagttcttggagcaaaatcagatgaacaaaacagttttagggaatggtaccgagatcaacgtttcaaaggttgatcaaccatctcgtgcggttccgcttggccttgatgagttcaagagcagagcgtccaattctcgaaacaaatcgttatcagatcaggtcagtggtgtgattcacaggatggagcctggagggaaagagtacaattatgcatctgcttcaaaaggcgcaaaggtcttgtcttccaacaaggaagcaaagggggctgcaagcatcctaagcagggacaatgacaagtacctcagaaatccttgttctactgaaggtaaatttgttgttgtagaactttcagaagaaactttggtaaataccatcaagatcgcgaattttgagcattactcttccaatctgaaagagtttgagcttcaaggcaccctagtttatcccactgatacctgggttcatatgggaaacttcacggcttcaaacgtgaagcatgagcagaacttcacacttcttgagccaaagtgggtgagatacttaaagctaaactttattagtcattatggttcagaattctactgcaccttgagtttaatagaagtctacggtgtggatgccgtagaacgaatgctggaggatttgatatctgtccaggacaacaaaaatgcatacaaaccccgagaaggagattctgagcataaggagaagccaatgcagcaaatagagtcacttgaaggcgatgatggtgctgataagagcacgcacagagagaaagagaaggaagccccaccagagaatatgttagcgaagactgaagcatcaatggcgaagagtagtaataagctgtcagagcccgtggaagagatgaggcatcatcagccagggagcagaatgccaggggacacagtactgaagatactgatgcagaagttaaggtcattggacttgaacctatcgattctagagagatacttagaggaactgaacctgagatacgggaacatattcaaggagatggaccgtgaagccggtgtgagagaaaaggcgattgtggctttgagacttgacttggaaggtatgaaggaaaggcaagaggggatggtgagtgaagcagaggagatgaaagagtggcgaaagagagtggaggcagagatggagaaagcagagaaagagaaggaaaacataagacagagtcttgagcaaattgtattcgatacaatgaagtcttcttatatagtctatagaaaaattgaaaaaaatgggcataattcttttgcggacgtaagtaaaagtgaaaattttttttgtttggagaaactaatcatacaatgtggtgcaggtaacaatttgcgtttggattgcgtttcccatccctctcctcctcctcctcatcgttccatggcccctccaatttttgtaccgccttctacatcacacaaaggacaaggcccataa

SEQ ID NO: 6644 - protein, 639 aa, Arabidopsis thaliana
MLRTNSCVLVDEPLNDSMGMADPDDGQSDEKVVPFDGPLSLASASVDVTSDLSRNDDVNLSEESEDKEQEAEISSTVSGNDIESKDTYLLKQSEINKKDTGIDAGSKYDDFPKKSEINNTGTWNDTEGKDDNNFLKQSQLNKTGTGNDTESSDNEFLEQNQMNKTVLGNGTEINVSKVDQPSRAVPLGLDEFKSRASNSRNKSLSDQVSGVIHRMEPGGKEYNYASASKGAKVLSSNKEAKGAASILSRDNDKYLRNPCSTEGKFVVVELSEETLVNTIKIANFEHYSSNLKEFELQGTLVYPTDTWVHMGNFTASNVKHEQNFTLLEPKWVRYLKLNFISHYGSEFYCTLSLIEVYGVDAVERMLEDLISVQDNKNAYKPREGDSEHKEKPMQQIESLEGDDGADKSTHREKEKEAPPENMLAKTEASMAKSSNKLSEPVEEMRHHQPGSRMPGDTVLKILMQKLRSLDLNLSILERYLEELNLRYGNIFKEMDREAGVREKAIVALRLDLEGMKERQEGMVSEAEEMKEWRKRVEAEMEKAEKEKENIRQSLEQIVFDTMKSSYIVYRKIEKNGHNSFADVSKSENFFCLEKLIIQCGAGNNLRLDCVSHPSPPPPHRSMAPPIFVPPSTSHKGQGP

SEQ ID NO: 6645 - DNA, 2706 bp, Tetraodon nigroviridis
  CDS (1)..(2706)
atggacctgagctcccctgttacctcagacacagattcttctgtgagctgcaaagaccccgaggacatccccacctttgacgagtggaagcggaaggtgatggaagtggagaaagagaagactcagtctgttcatacagccagcagcggttcctcacacactggaaagaaggtccagaagaacttcaacaactatgcttcggtggagtgtggagccaagattcttggttctaacccagaagcaaagagcacctcagccattttgatggagaacatggacatgtacatgctcaacccctgtagtaacaaaatctggttcatcattgagctgtgtgaacccgtccaggtgaagcagttggatatcgctaacttcgagctgttctcctctacacccaaagattttgtcgtctccatcagcgacagatacccaaccaacaagtggcagaagctgggcacttttcacgccagggatgagcgcacggtccagagcttccctttagatgaacacctctatgctaaatatgtgaagatgttcgccaagtacataaaggtggagcttctgtcccactttggatctgaacatttttgccccctcagtctcttaagggtgtttggcaccagtatggtggaggagtatgagttgatcgctgatcctccagaaagaccagatgatctggatgatgattttgattatcctccaggatacacacctgaagtcaagttatcaaagaatctgatcggttccgccaaagaagtgattgtgcatctatttttaaacagtgctttgctgatctccctctgtagtcccgagtctgaagggggaagcatttcagccgatcccaccatccctgcagctgtagccccctcctcagagaccccagaagcgcctaccaccgatctgagtgatcagccgctcccccacgtggaggaacaagccgtccttcctttagagaaagatgaggaagagccaatcagctcgacaatcactcttttggataaggaggaagagccagatgacgaaaaagagaaaggaggttttcgtggccgaaatcagggaataccagtccactgttctgttccctcattttcctccttctgctcctgcaacgcttctctccaagagtatctccatcagcagtgttctgcatcgctctccaacaaaagaaaatgccaaaccgtacaccaaaaacagacaatcccatctattgaaacacctgcttggcagcgacctctgttgccctctggctggcaggaacctcagcagcctcacagcgaggaacaagaacaagcagctgaaccggagccagagagccaagccagctcctcagaagcaccacagcctccagagaacactgcatcttccaaagactccattttggaacttcccctgctggagcccagtcaaagctccaacctgcccaaacacagtgtcactgactcatcctctgccaagccaactcctggtgtggagactccgctgctggcttcaggggaaccaggaaaaaagccggatgtgctggctgaagagaggcacattgagccctcagcccctcccagtgggtccagtcacgtgcaacccactgtcagcatcacagcagacgagtcctcggtggtgtcggcagaagagacgcttcaagccgatgtttctcagtctgacacgaacaccccagatcaaacagatcaaattctcagcccccccacctcccttttttatcccgatccgcctcttctcaacgaagctgatagcgtttcccccgaagtgcccaaccttgttccagatctcagtgtggaacctgagccctccagtggccacccaggtattacagccaccaaaacggaggatatctccgaggacgcctccacgtctgcaccctccgccgcggcgcctcctgtctcgtcttccctgcctacatcaccgtccctgtcagacatctatgcagacccccccaatggcacggagcagaacgggaatccggtccatggctccagccagaaggagtcggtgttcatgaggctcaacaatcgcatcaaggccctggaggtgaatatgtccctcagcggacgctatctagagcagctgagtcaaagatatcgaaaacaaatggaagagatgcagaaggccttcaacaagactgttattaaactccagaacacctcgagaatagcagaggagcaggatcagcgacagaccgagtccattcagctgctccagggtcagttggaaaacatgaccaggctggttctcaacctgtctgttcgagtcagtcagctacaggttgaggtgtcagagcggcagaactacctggtgctgtcactggtgctgtgcttctgtgtgggcgtgctgctgtgcgccaaccactgccgcctcgccaccggtcctccgaacacggaagcagagcctcccgtggctaagagctactcctactgctgtgccgaaagacagttctcctcctgcgacgagccgagcttgaagaggagcgcatcctatccactcatccactcggagtcattccagttagccgcaactgaaggcaagcagactcgccgtcagagggcagctcagaggggtcctcacactcagacgacccctccttctgtggcatcgccacaacctgcagcagaatctgcgacggcgtgcgtccagccaagagccagactgagaagcaggcccccagacgcaggcgtcccaagcccggatgtgctgtga

SEQ ID NO: 6646 - protein, 901 aa, Tetraodon nigroviridis
MDLSSPVTSDTDSSVSCKDPEDIPTFDEWKRKVMEVEKEKTQSVHTASSGSSHTGKKVQKNFNNYASVECGAKILGSNPEAKSTSAILMENMDMYMLNPCSNKIWFIIELCEPVQVKQLDIANFELFSSTPKDFVVSISDRYPTNKWQKLGTFHARDERTVQSFPLDEHLYAKYVKMFAKYIKVELLSHFGSEHFCPLSLLRVFGTSMVEEYELIADPPERPDDLDDDFDYPPGYTPEVKLSKNLIGSAKEVIVHLFLNSALLISLCSPESEGGSISADPTIPAAVAPSSETPEAPTTDLSDQPLPHVEEQAVLPLEKDEEEPISSTITLLDKEEEPDDEKEKGGFRGRNQGIPVHCSVPSFSSFCSCNASLQEYLHQQCSASLSNKRKCQTVHQKQTIPSIETPAWQRPLLPSGWQEPQQPHSEEQEQAAEPEPESQASSSEAPQPPENTASSKDSILELPLLEPSQSSNLPKHSVTDSSSAKPTPGVETPLLASGEPGKKPDVLAEERHIEPSAPPSGSSHVQPTVSITADESSVVSAEETLQADVSQSDTNTPDQTDQILSPPTSLFYPDPPLLNEADSVSPEVPNLVPDLSVEPEPSSGHPGITATKTEDISEDASTSAPSAAAPPVSSSLPTSPSLSDIYADPPNGTEQNGNPVHGSSQKESVFMRLNNRIKALEVNMSLSGRYLEQLSQRYRKQMEEMQKAFNKTVIKLQNTSRIAEEQDQRQTESIQLLQGQLENMTRLVLNLSVRVSQLQVEVSERQNYLVLSLVLCFCVGVLLCANHCRLATGPPNTEAEPPVAKSYSYCCAERQFSSCDEPSLKRSASYPLIHSESFQLAATEGKQTRRQRAAQRGPHTQTTPPSVASPQPAAESATACVQPRARLRSRPPDAGVPSPDVL

SEQ ID NO: 6647 - DNA, 2547 bp, Theileria annulata
  CDS (1)..(2547)
atgagtttacataattcgaggggaaattcctttaaagggattcccaaaaaacctaaaatcgagaaagtcgctctgattaacaaaagccacttaaaattacaagacaatttcagtgcttatgagtctaaattaactactagccgaattaaggggaaaccttttaaccctgatttatactcattaaaaattgactttgcctctgaagagttcggcactaagattatcgctcattccaagaccttatcaaaagtatccaagattttggaagatgattcgtgttcatatatgcttacaccttgtaatacttcggactggtttgttttgtctttccccgagagtattttgatccaggaaatatcatttctatctttcgaatactattcatcattatacaagaaaattagaatctcaattacaagttcttatcctagtgggaaatggcttaccttaggtgaattggaaaccgacccttccagaaatgagattttcgacctttcggtcgtctgtaacactgataaaaatgattgttggggtaaatacttgaaggttgaactcctagattaccacaaactcgagttaaactactattgctcaattactaagatgatggtctttggaataaccgctgtagagtatttggaaactgaaatctctgacgacagttctctttacaatacattcattcagccaaatggtactggatatcccccaatcactcatgatactaatactgtggatgaaagttctgttgtctcgagtaaacacttgactggtatggttactaaaggtagtgatgtggatagcattgtggttactagtaaaaatgaacccccagttgataaagaagtttgtgaattgaatgtgtttgatgaatctccgataaagaaattgtcagatttaaagtgttttggaaagagttccgaagtgttgaacccaacctttgtgtatgatataaagaatgttattgtgaaatcattttacaaattcctaatgcgactagcactgagaaaagatgataattttcataataaaaagctaatttacagagtattgaagattgggaaaattaaaaagtattgcggtacaaatttccttttccagttcgactgtaacaggttcatcacacacttacttttggaaaagtactctgtatattattctaacattttggatcgaattaaactcccttcaagacatctctggcatgttataagtaggataatgaatgatgtgggaattaaagaggtaccaattttggtatgtacagagtcgattggtttcatttccaaattcaagtgctatttctactttaacctgaaatcattttctactcttctttttactcaatttactgagggttacagaattcacacaattaactctagaaattctagattaaatcacaatttgctgagtaaactatatttcttttatgttgacaataaaattactgtcatgacagctcccaaatttagaggattaacagtagatgacgagagtttagtcaaaagatacgactacaaggttaaggataagtatatatcaactgtcactgtaataaataataagttgtatgttaatatgtcatccagttattccactcattttccctttgatatagacccaccagatcccaaacttgataatgaactaatcaaggcaaatacttccttgtataaagataatctaaatagattaaacatgtcaaaaaggttcgatcaaaaggtcaaatttcatgaaaaggaaaagtttaaacatcataattattaccaagatgaaaacacaaagtctacagattctaaaacacataaacatgtacttttaaaattatccgaacgtataaaatctctcgaattcctaaccaataaactttccaataaaatttatcaacttgaaaatctactcaacttttacattaaaagacaattttattacaatcaacatgtggaattggaacgtgaactgaatgatgagtttgaagtaatattaaaagtattggatataaagaaatataaattggttgtacgagatatttcgagtcttagaaatgcattaaggaaaactgaatactattataaaagaataaaacaatataatgaatatgagacaagttatttgtacattaaaacccgtgatcttttacgtttaaaaaaaagtttatgtaaattaacaaattgcacttctgaaaggaaatcatttaaaagatgtttatttctatgtaaattaagcaaattttataaactcttcaataaacgaaagttggccaaatctattgcaaattatggttgtaaatgtgttcacagtactcatttccataatttatctctagaccaaagagacgaatggttgtatatggacagaaatgacaattataatgttttattaattttaaatgatcttgtttgcttttttagggataaattttctggttactttaatttttattttctattcctcctgtacatttgtacacaaatattttggatttgtaaattcaactcacatgataaaaaaatcagaaaattactcattttaaaaaataattaa

SEQ ID NO: 6648 - protein, 848 aa, Theileria annulata
MSLHNSRGNSFKGIPKKPKIEKVALINKSHLKLQDNFSAYESKLTTSRIKGKPFNPDLYSLKIDFASEEFGTKIIAHSKTLSKVSKILEDDSCSYMLTPCNTSDWFVLSFPESILIQEISFLSFEYYSSLYKKIRISITSSYPSGKWLTLGELETDPSRNEIFDLSVVCNTDKNDCWGKYLKVELLDYHKLELNYYCSITKMMVFGITAVEYLETEISDDSSLYNTFIQPNGTGYPPITHDTNTVDESSVVSSKHLTGMVTKGSDVDSIVVTSKNEPPVDKEVCELNVFDESPIKKLSDLKCFGKSSEVLNPTFVYDIKNVIVKSFYKFLMRLALRKDDNFHNKKLIYRVLKIGKIKKYCGTNFLFQFDCNRFITHLLLEKYSVYYSNILDRIKLPSRHLWHVISRIMNDVGIKEVPILVCTESIGFISKFKCYFYFNLKSFSTLLFTQFTEGYRIHTINSRNSRLNHNLLSKLYFFYVDNKITVMTAPKFRGLTVDDESLVKRYDYKVKDKYISTVTVINNKLYVNMSSSYSTHFPFDIDPPDPKLDNELIKANTSLYKDNLNRLNMSKRFDQKVKFHEKEKFKHHNYYQDENTKSTDSKTHKHVLLKLSERIKSLEFLTNKLSNKIYQLENLLNFYIKRQFYYNQHVELERELNDEFEVILKVLDIKKYKLVVRDISSLRNALRKTEYYYKRIKQYNEYETSYLYIKTRDLLRLKKSLCKLTNCTSERKSFKRCLFLCKLSKFYKLFNKRKLAKSIANYGCKCVHSTHFHNLSLDQRDEWLYMDRNDNYNVLLILNDLVCFFRDKFSGYFNFYFLFLLYICTQIFWICKFNSHDKKIRKLLILKNN

SEQ ID NO: 6649 - DNA, 1755 bp, Cucumis melo
  CDS (1)..(1755)
atgcggaagcctgttggagctcttctgcatgatagaagagctgttcgagtgcctattagtggaagaaatcatttgtataaagtttctatttctttggtttttattctttggggacttatcttcctctttagcttatggatcagccgtggggatggctgccaagaaggatcaattttgcttcctgatggtgtatctactacaaatgaatctaaattggaaaataacaaggactctgacgttttatgtgaacctccaaacggtgaatctcattgtaccattcatttaaacaattcatgttcaatcaatgcttcgagccctggttctgataatgaaatactttcaagcgaagaaagtagcagtcatattcaagctactacgaggttgcctgaggatgagagctctagcactagagtaaaacctgaaagcaaacctcccaagggagatatctcgtcagacactgttctacttggccttgaagaattcaaaagcagagcgtttgtgtcccggggtaagtctgaaactggccaggctgggaatactatccatagattagaacctgggggtgcagagtacaattacgcctcagcttcaaagggagctaaggttttggctttcaacaaggaagcaaagggagcttcaaacattttgggcaaagacaaagataagtacctcagaaatccttgttctgctgaagagaaatttgtcgtcatagaactttcagaagaaaccttagtagtaacaattgaaattgctaatttcgagcaccattcttctaacttaaaagaatttgaggtacatgggagcttggtttatccaacagatgtttggttcaagctcggtaatttcactgctccaaatgcaaaacatgcacatagatttgttctcaaggacccaaaatgggtgagatatttaaagttgaattttcttacccattacggttcagaattctattgcacactcagcactgtggaagtttatggaatggatgctgttgagatgatgctggaggatttaatatctgctcaacataaaccctctatatcagatgaagctactcctgataagagagtaattccctcccaacctggccccattgatgaagtgtcacatggtagagagttgcaatctcttgctaacgaggaaggtggtgatggtgttgatttagaactttcaaagagtaatacacctgatccggtcgaagaatcacaccatcaacagcctggcagaatgcctggtgacactgttctcaaaattttgacacagaaagttcgctcactagacctaagtttatctgttttggagcggtatctagaggacttaacttccaaatatggcaatattttcaaagaatttgacaaagatatcggaaataataatctactcattgagaagacccaagaggatataagaaatattcttaaaatccaggacaacacagataaagatcttcgtgatctcatttcttggaagtccatggtttccttgcaattggatggtctgcagaggcataattctattctcagatctgagattgaaagggtacagaagaatcagacttctcttgaaaacaaaggaatagtagtttttcttgtgtgtctaattttttcatcatttgctatttttagattatttttgcacattgttcttagagtatatgagagaacaaataattccaggaaattttgttgtataagcccttcctggtatctattgcttttgagctgttgtatcattcttttcgtacagtcactataa

SEQ ID NO: 6650 - protein, 584 aa, Cucumis melo
MRKPVGALLHDRRAVRVPISGRNHLYKVSISLVFILWGLIFLFSLWISRGDGCQEGSILLPDGVSTTNESKLENNKDSDVLCEPPNGESHCTIHLNNSCSINASSPGSDNEILSSEESSSHIQATTRLPEDESSSTRVKPESKPPKGDISSDTVLLGLEEFKSRAFVSRGKSETGQAGNTIHRLEPGGAEYNYASASKGAKVLAFNKEAKGASNILGKDKDKYLRNPCSAEEKFVVIELSEETLVVTIEIANFEHHSSNLKEFEVHGSLVYPTDVWFKLGNFTAPNAKHAHRFVLKDPKWVRYLKLNFLTHYGSEFYCTLSTVEVYGMDAVEMMLEDLISAQHKPSISDEATPDKRVIPSQPGPIDEVSHGRELQSLANEEGGDGVDLELSKSNTPDPVEESHHQQPGRMPGDTVLKILTQKVRSLDLSLSVLERYLEDLTSKYGNIFKEFDKDIGNNNLLIEKTQEDIRNILKIQDNTDKDLRDLISWKSMVSLQLDGLQRHNSILRSEIERVQKNQTSLENKGIVVFLVCLIFSSFAIFRLFLHIVLRVYERTNNSRKFCCISPSWYLLLLSCCIILFVQSL

SEQ ID NO: 6651 - DNA, 3093 bp, Brachydanio rerio
  CDS (1)..(3093)
atggatcatgaaggagcgacagaccctcctgtacccagtaaagaagacatccctaccttcgatgagtggaagaagaaagtgatggaagtggaggagaagaaaagtcagtctctgcacacttcatcaaatggcagccctcatccagtcaaaaaggtccaaaagaatttcaagaataactacgcttccgtcgaatgcggggccaaaattctttcggccaacaacgaggctaagagcacatctgccatcctgatggagaacatggatctgtacatgctgaacccctgcagtaccaagatctggtttgttatcgagctctgtgagccaatccaggtgaagcagctggacattgcaaactttgagctgttctcatccacaccaagagacttcctcgtgtccataagcgacaggtatccgactaataagtggatcaagctgggcacgtttcacgcccgtgatgaacgcacagtacagagctttcccctagacgagcaactctatgccaaatatgtgaaggttgagctgctgtctcattttggctctgaacacttctgtcctctcagtctgatcagggtgtttggcaccagtatggtggaggagtatgatgagattgcagactctcagtacacgtcagagagagctgaatatctggatgaagattatgattacccacccggctacctgccgtcagaggacaaggcatcaaagaatctgctgggctctgccacaaatgccatcctgaacatggtaaacaacatcgcagcaaatgtgctcggaggcaaaccggagctggaagacggagctgaactggaaggaaatgtttcctctgggaccgaaaacgtcacacaggcatcaacagaaaccacacttacgccagatccgacccccactgaacagccccatacgctggatgttctggagttggatcccacgtttgtgaaggaggacatggaggctcctatacccgaggctccttcacaagctcctacagtagctcctgctgaggagagccgtattgtcattctcatcgaggaggatgaagagtccactcagccgacggtgaccctgctggaggaggagggtgaggaggagaggaggctggaggagctgtgggagagcgagagcactacctactgcggccacctctccacgctctcctgcctggcgtctttacatgaacacttctactgctactgctcagcggcgttagcactgcagcgccagcgtaaagaccgccgccacaaagcccagcacacacaagcccacactaaaactcaaaccacctctcagcagaccctcaccgaccctacgccttcccaagaacctcctgcaccctcagagaaactatcagaagcagagcggccctcgcagacgcagtctgagaggatttctcctactgaaacggcagctgctccatctgaatcctccaactgggaatcttcatccacagagctggaacttccacctgagaccatccttttggagcccagccgcacctccaccctccctccacacagcttctctgaaacccccacccaaaacatcccggagtcccttcctacaggagagcctgttgaccagcgtccgcagtacctggtggacatccctgaaacccacgcccctgggagtgtttgcagcagcaccagcagtgttccgtctccctccgctgtctcctctacacccctctccagcaccactgaaccccacagcctagagacggaccctcccaaactggagctcccagttcccaccaaagagcagacagctcagccgttgcccactcacaccaggcctgctgaaatccctcctcctaccgaaattcccatcctgattccagaggcctccgaaaatggcaaggtctcattagttgaggaccaacaccacaatgctgtggtgtcccaaccagagctttctgaagccccacatgaggacacagttgatgatattctgctcccgcaccgcactgccggagagttttatgcagagcagcagcagacagccgaaatgggccacagtaatggaaacggcaatggtaatcaggtgcacgggtccaaccagaaagaatcagtgttcatgagactgaataacagaatcaaagcactggagatgaacatgtctctcagcagcagatacctggaagagcttagtcagaggtatcgtaaacagatggaggagatgcagcgggctttcaacaaaaccatcatcaagctgcagaacacctccagaatcgcagaagagcaggaccagaaacaaactgagtctatacagatgttgcagagtcagctggagaacgccaccaggatcatgctgaatctgtctgccacagttgcccagctgcagcgagaggtgtctgatcggcagatttacctggttctgtctctgatcctgtgtctgatgctgggtttgctgctttgtacacagtgctgcaggagctccaccaatcacaacaccagcccgaccattcccatgagcaacaactaccccagtcccaagaggtgtttttcctcatatgatgatatgagtctaaaacggagagtttcttgccctctggttcgttcaaagtcatttcagctgcctacgtctgaaggacccgatgacttgtacattgtagaacctctaaggttttctccagagaaaaagaagaagcgctgcaagacaaaagcaggagagcgcgtggagacgctccgggcctcagcgacggctcctaacggcctgctcaagctcaatggagaatcctcacctcctcttcagttcctgccgtcgacctgcaacggctacacgtccacctgctcgtccagagactgtgcttcagagggcagctccgagagctccgtgtccacactgtcagaggagtcgttcggcagcgccccttcagtgaacggacatgagcttgttctatataacggagagcctccgccagcctgccctccagccaagagcaggacggagaagaaacgccgccgctccagacagggagagcaggacagcatgctgagcgcatcgctgcccctgcccgcgctggaggagctcatcaagggcaagacggagctcggcgtagcctctttcggaaggacagcagtcacaggacgagtttga

SEQ ID NO: 6652 - protein, 1030 aa, Brachydanio rerio
MDHEGATDPPVPSKEDIPTFDEWKKKVMEVEEKKSQSLHTSSNGSPHPVKKVQKNFKNNYASVECGAKILSANNEAKSTSAILMENMDLYMLNPCSTKIWFVIELCEPIQVKQLDIANFELFSSTPRDFLVSISDRYPTNKWIKLGTFHARDERTVQSFPLDEQLYAKYVKVELLSHFGSEHFCPLSLIRVFGTSMVEEYDEIADSQYTSERAEYLDEDYDYPPGYLPSEDKASKNLLGSATNAILNMVNNIAANVLGGKPELEDGAELEGNVSSGTENVTQASTETTLTPDPTPTEQPHTLDVLELDPTFVKEDMEAPIPEAPSQAPTVAPAEESRIVILIEEDEESTQPTVTLLEEEGEEERRLEELWESESTTYCGHLSTLSCLASLHEHFYCYCSAALALQRQRKDRRHKAQHTQAHTKTQTTSQQTLTDPTPSQEPPAPSEKLSEAERPSQTQSERISPTETAAAPSESSNWESSSTELELPPETILLEPSRTSTLPPHSFSETPTQNIPESLPTGEPVDQRPQYLVDIPETHAPGSVCSSTSSVPSPSAVSSTPLSSTTEPHSLETDPPKLELPVPTKEQTAQPLPTHTRPAEIPPPTEIPILIPEASENGKVSLVEDQHHNAVVSQPELSEAPHEDTVDDILLPHRTAGEFYAEQQQTAEMGHSNGNGNGNQVHGSNQKESVFMRLNNRIKALEMNMSLSSRYLEELSQRYRKQMEEMQRAFNKTIIKLQNTSRIAEEQDQKQTESIQMLQSQLENATRIMLNLSATVAQLQREVSDRQIYLVLSLILCLMLGLLLCTQCCRSSTNHNTSPTIPMSNNYPSPKRCFSSYDDMSLKRRVSCPLVRSKSFQLPTSEGPDDLYIVEPLRFSPEKKKKRCKTKAGERVETLRASATAPNGLLKLNGESSPPLQFLPSTCNGYTSTCSSRDCASEGSSESSVSTLSEESFGSAPSVNGHELVLYNGEPPPACPPAKSRTEKKRRRSRQGEQDSMLSASLPLPALEELIKGKTELGVASFGRTAVTGRV

SEQ ID NO: 6653 - DNA, 2409 bp, Caenorhabditis briggsae
  CDS (1)..(2409)
atgttggcactacccaacataaatgctaaccgagaagtgtcacttgtgaaaaactggaaagagatcttgctcacagaaggagaagatggattgatatgcacgttgtcgttggatgcatgttccaggtcagcaaccccatacaatgtttcaaaaaaaatttcaaagacatcagtgaatgcgtcagaaaaagaacccttaccagaaaaaagtattgaaagcttcgatgaatggacgaagaaaagaagagatgctgtagcaaaccaaaatgtacatcatcaaaaggtgatggagccaccatccggagcaacagcaagacatgatgaagtcgtcatttcccttcctccgatttctcgaccacctagaaattttgcgagtcgagagtgtggggcaaaaatcatagctgctaatccagaagcggagaatgcgaaagccgttctaaacgagaaagatgttgatgattatatgagaaacccatgtcaatcctccaaagaaaagtttattgttgtggaattatgcgaagcaattcaaatcaaaaagttggcgattggcaacttcgaattgtttgcctcgagaccgaaaacaatacaagtattcatttctgagagatatccacctctagctagttgggtttctctaggatcttttcatctacaagatcatcataagcatttacaaacattcgaagtaccaaataccaatatctatgccaaatacgtcaggatcaatcttgaagatcactacgggaaagaacattactgtattgtttccgttgtaaatgtaatgggaagtacattgtctgacgaatatgacaaagaagaagcagctgcacaccttctaaatgttattgatgaaaagaatgaagaaccagttacgactcctccaccttcagagcaaaaggttcagactcaattgccagttccaccacgaggatcaaattataccaataagttgaaaagattcagcttcctcgaaatccgatccatgtgctcacagtgttcggcagaaaaagtttcgtatttgcattgccatctgcttaccagacaatcgaaaccattcaagcctactctcacaccgaaaccagtaacagtaaaaccaccagtcaccgaaaatcgaaatttgaaagtggaaatcggtttatgggcagagagaagtaggcacaccattttcgaacaatctaggaggagaaatttggcaaccatacagcgattacgggcagaagacactgctacagagagcacttcgactcctactgttccaaatggtccagtagaaactcctgtaccaaaggtggatgaaattgtaaaaactgaagagaaaatatcaacttcggatgaaacgaaaccaacggctcaaccagatatcccacagcaggctcaggaacaaacgacacctgcccctcctaagacaaaatcggagtcaattttacccgctggtggatccacaagtcaaagagaaatggttctgatgaaactgagtaaacggattgctgcagtggaaatgaatttgacgctgagtacggagtatctctctgaacttagtaaacaatatgtctcgcaaatgagtggctaccagcatgaactcaaagaaactcggaaggcttccagaaaatctgctcagactgttgaagcaattatgcgctcaaaaattaacaatgtgaagagggagcttcgagaactccgacaatcggtttacctattgcagcaattggaaaacagtcgttataagaacgctcagaacgaaatgagtcggaatgtatttatgtcatcttgtcatataagctcaaatgtgccaccaagtccaacgctccccaaactaccgttaatcattccatctgtgagtgacaagctggaaaactttacaaaatttgaagaaagaatgaaaaagatttatcaaactgctaaatcggtgatgttaggatcgataacctggaatactgatcatctgattgttgctctgatttccttcaacattctggctctatcatttctattcgctggtgtattctacattcacagaagaaataaagaacgatgcgaggagactcagtcaattgtgcgcaatgaattgagaactcggatagcaaaagttggtattgaaaacaagaagtttatatcgaaaggaatgcgacgtgctgagctcgctgtaactgctgctgtttcatcagctctgaaagtggagaaaacgtcaagtagtcgaaaaacaatgaccgaattggaaactgctcttgcgaatctgtttgctgctcagcaagtgcggatagaagaacaatttgtacagaatcaacgagttctccgggatgttttggccgaagggcagcgaccgagagcagatgataatttgagtgtggaagacagtgagagtttatcagaaacggagaaagaagacacaccaatttccaatcaagactag

SEQ ID NO: 6654 - protein, 802 aa, Caenorhabditis briggsae
MLALPNINANREVSLVKNWKEILLTEGEDGLICTLSLDACSRSATPYNVSKKISKTSVNASEKEPLPEKSIESFDEWTKKRRDAVANQNVHHQKVMEPPSGATARHDEVVISLPPISRPPRNFASRECGAKIIAANPEAENAKAVLNEKDVDDYMRNPCQSSKEKFIVVELCEAIQIKKLAIGNFELFASRPKTIQVFISERYPPLASWVSLGSFHLQDHHKHLQTFEVPNTNIYAKYVRINLEDHYGKEHYCIVSVVNVMGSTLSDEYDKEEAAAHLLNVIDEKNEEPVTTPPPSEQKVQTQLPVPPRGSNYTNKLKRFSFLEIRSMCSQCSAEKVSYLHCHLLTRQSKPFKPTLTPKPVTVKPPVTENRNLKVEIGLWAERSRHTIFEQSRRRNLATIQRLRAEDTATESTSTPTVPNGPVETPVPKVDEIVKTEEKISTSDETKPTAQPDIPQQAQEQTTPAPPKTKSESILPAGGSTSQREMVLMKLSKRIAAVEMNLTLSTEYLSELSKQYVSQMSGYQHELKETRKASRKSAQTVEAIMRSKINNVKRELRELRQSVYLLQQLENSRYKNAQNEMSRNVFMSSCHISSNVPPSPTLPKLPLIIPSVSDKLENFTKFEERMKKIYQTAKSVMLGSITWNTDHLIVALISFNILALSFLFAGVFYIHRRNKERCEETQSIVRNELRTRIAKVGIENKKFISKGMRRAELAVTAAVSSALKVEKTSSSRKTMTELETALANLFAAQQVRIEEQFVQNQRVLRDVLAEGQRPRADDNLSVEDSESLSETEKEDTPISNQD

SEQ ID NO: 6655 - DNA, 4254 bp, Drosophila melanogaster
  CDS (1)..(4254)
atgcacatgcggctgcacttggtgcgctttatgttcataaatctgctgctgagctgctgtttctggttgtacgacaatgtggcagctgcagactcacaaatcccaagcagggctggcgactcagccaaggatgcagctcggaaaacccacatagagcccgaggaaccggcggcgcctccaaggccggaacctccacccccgccactccacaacggagctggagttttgttgccctctgcacaggagggcgtgcccatcgttgccacatcctcctcctcctccttcgccgaagtgccccaaactggcaatcggccaatatctggggacacgtcagtgcctgtaaaggagctgcccgcgctatctgaccagcagcggaccaaaagccatagtgaatatattagtgaaatcgatttagccgctgatgtgggtggcgcgtcctcatccaccgcccaagtgccaaataatcaattaaattataataagcgtagcagtgccggtaaagtgcatagatttagtgaatcgcagcaattagaccaaccaaagcaattggagcaggaggagccggcgacggggcagccgaaagcgccggagctgcaggaaccaccacaactaccgcaggcggaagaaagttttcccgagatcattacggagctgccagctgtcacaataacagagctcccgctggatcgagttatgaaccgcctggattcggttatacttgacgggtccccggccacagccggaaaccacagcgacgaggagcagcatcagcagcagcagcaacctcatgaggatcagcccatgcaagtttcggaggctgacgaggaagttcctcaaaaagacgagcaaatgccgaagataaacgatcctggcggaggcattcaagtggaaggaatggtcacaccagaagctgcgacagtgggcgaaacccaagagagcagcgaggagttgcagcccggatcagctgcattcaatgggacagagggcacggctaacttgacgaatgccaacgaggaagtgcccatgccagtgttttccgagtgggcgcagaagcaaatggaggcggaggccagcagggagcaggccatggagttggagcagcaggtggtaaataagtccgcccaacgcaagaacaacactggatcttccagtggaaagccgccgacgctgaagctgcgctccaagaactacgcctcgccggactgcggagccaagatcatcgcacacaattccgagtccaagcatacggaggctgtgctaacccaatccaccgatgagtacatgctgagtacttgcgaaagtcggatttggttcgtggtggagctgtgtgaggccattcaggcgcagaaggtggacgtggccaactatgagctgttcagttcgtcccccaaaaactttacggtagccgtttctaaacgattccccacacgagactggagcaatgtgggacgctttgcggcggaggacaagcgaacaattcagacttttgagcttcatccacacttattcggaaaattcgtgcgcgtcgatatcacgtcgcactacgccaacgagcacttttgtccgctgtcgttgttccgagtgtttggcacctccgagtacgaggctttcgaaacggaaatccgaccaagcgatgacctggacgatttctacgacgactacggcgctcaagaacagaaggcagccgtgggcagtggtggaaacatctttcaaagcgcctcggatgcagtgatgcaaatggtcaagaaggccgcagaggttctcgtaaagcccacaaaggctctaaaatggtcagaggaatcggtgctctgtcaaacgccagcatttgaagccttcagctgtatcaattgtaataccaccctggtcgagaggattaacagtcttttatcctgccagttccagcagctgcaggcactcctcagtcttagtcacttacggtcagatcttctaaacagtcgcgtgtgtcaggaggagttcggcataagccttacgggctcggagttcgccagtaaaatgggtaaggagcagagctatttccttagtatgttgccagcggagcacgtgggagccatgtgtaaactcattcaggcggagcagaatgtgactgaccataaccatacaaaggcgccttctctgaagcagcacgtaagctcaccagaaccagtgcaggataacgccactgctacgggtgttcggcaggattgtgagaacagtaaaacgcccacaaaggaaccgcttacaccaagtcttgaggttgtggtgcccgaggtgagccaagaagtgccttcaatggaagaccagtcgtcgacctccagcgaaacagtctccacaacgaactccacgcctgccgacgtcaatatattcaatatgccgtcggaacctgaggaagtggttgtcaaagttcagcttcctccggagccaacacttccaacaactttgcagcccagcgatgtggaatcgttcactgacgctcctagcacaaatgcactccctggctctagtgaagctgtagcgaacggagatctgggtatggaggagggtaatccggctaactgggacggcattgacaacctactgaccacgacggtggcttcgataaccgctggcggaggtgcagctgccgctgcagccgccgtggtgaacggaaacgccaacatcggaggagccggcattgtcggagcaggaggaccagccagtctatccagtgttaacatgcagcagaagctgacgaatggagcccagtcggagagtgtgttcatcaggctctccaatcgcataaaggcgctcgaacgaaacatgtcgctttctggacaatacctggaggagctctcgaggcgttacaagaagcaagtggaggagctgcagcagacgctgacacaacagacgcttacggtgcgccaactggaggatcaaagcaggcggtacgtagagcaggagcagctgtaccagcagcacagcgcggagttggccggcgaggtgagggcattgtcgtatcaggtgcaggcctgcatcctggtcatcatcattgtgggcacctgcatcttcctgatgctcgtcctgggcactgtctactatcgcaagctgcgacgccagcaacaacagctactgaagaaggaccaggcgggccatccacctgtggctgcgaaaccaaaactggatcgccgtaagtcctatgaacagacgccaaatcagagcacacccaagcaacggcgtccaagcgaggaggccatgctcattctgaaggagtgcggggacagcaacatgcaggagttggatccaccaagccgtcagcgtaaaatttcagtttgctatggcagcaacaataacatagccgccaatatggcgattgccaacacaaatggcggtgcaagtgtccgaaattctctgcacaggcgaaagggagccaagcactcgtggcacaacagtctggataccacggagacgtcctgcggcgagcaaacggacaagttcttcgatgtggacacccttaaaagcataaagcaaagctgcggtaagccgggaaagaaaaaatcccttcagcaactgaaaccattgggtcttaagcgccaggaatccgcgccagccacctatacgccggatttgcaagctgaagaaccagccacgcagagcgactttgacgagagcctaatgcttgacgatgatgatctagctaactttatacccaccagcgatttggcctacaatgagtttatgccagaaggaccctcgggctaccagattgtggacacagtagacggaaaacctggcaaagagccaggcaccaagaaatctagacgcctgtcctcgccggcattctttaagtcgccctttagcaagagcaaaaacaagggctacagctttaatggcgtcaaaaacagccatgcggtgcacgagcccacatcctgggagtggtaccgactcaaacgaagcgaaaagcaccagcagcaacagcaggcgaagctggtcagcaagagtctgcccagcgccagtctggacagctcgtcgctgtcggaggtaaacttcccacttagctccagcaccgccaccacacagaattcgtttcgcatactgggcgaggccattctgtcctccggggagggacgcatcaccccgaatgggaatggcaacgcaatgtctggcggtctggcaagcagcagtagtggtagtggcagtggtggcagcactacctcatccaccaccaagaagaaacagcgcgcccttaacaacctctttcgcaaggccttcgatttttaa

SEQ ID NO: 6656 - protein, 1417 aa, Drosophila melanogaster
MHMRLHLVRFMFINLLLSCCFWLYDNVAAADSQIPSRAGDSAKDAARKTHIEPEEPAAPPRPEPPPPPLHNGAGVLLPSAQEGVPIVATSSSSSFAEVPQTGNRPISGDTSVPVKELPALSDQQRTKSHSEYISEIDLAADVGGASSSTAQVPNNQLNYNKRSSAGKVHRFSESQQLDQPKQLEQEEPATGQPKAPELQEPPQLPQAEESFPEIITELPAVTITELPLDRVMNRLDSVILDGSPATAGNHSDEEQHQQQQQPHEDQPMQVSEADEEVPQKDEQMPKINDPGGGIQVEGMVTPEAATVGETQESSEELQPGSAAFNGTEGTANLTNANEEVPMPVFSEWAQKQMEAEASREQAMELEQQVVNKSAQRKNNTGSSSGKPPTLKLRSKNYASPDCGAKIIAHNSESKHTEAVLTQSTDEYMLSTCESRIWFVVELCEAIQAQKVDVANYELFSSSPKNFTVAVSKRFPTRDWSNVGRFAAEDKRTIQTFELHPHLFGKFVRVDITSHYANEHFCPLSLFRVFGTSEYEAFETEIRPSDDLDDFYDDYGAQEQKAAVGSGGNIFQSASDAVMQMVKKAAEVLVKPTKALKWSEESVLCQTPAFEAFSCINCNTTLVERINSLLSCQFQQLQALLSLSHLRSDLLNSRVCQEEFGISLTGSEFASKMGKEQSYFLSMLPAEHVGAMCKLIQAEQNVTDHNHTKAPSLKQHVSSPEPVQDNATATGVRQDCENSKTPTKEPLTPSLEVVVPEVSQEVPSMEDQSSTSSETVSTTNSTPADVNIFNMPSEPEEVVVKVQLPPEPTLPTTLQPSDVESFTDAPSTNALPGSSEAVANGDLGMEEGNPANWDGIDNLLTTTVASITAGGGAAAAAAAVVNGNANIGGAGIVGAGGPASLSSVNMQQKLTNGAQSESVFIRLSNRIKALERNMSLSGQYLEELSRRYKKQVEELQQTLTQQTLTVRQLEDQSRRYVEQEQLYQQHSAELAGEVRALSYQVQACILVIIIVGTCIFLMLVLGTVYYRKLRRQQQQLLKKDQAGHPPVAAKPKLDRRKSYEQTPNQSTPKQRRPSEEAMLILKECGDSNMQELDPPSRQRKISVCYGSNNNIAANMAIANTNGGASVRNSLHRRKGAKHSWHNSLDTTETSCGEQTDKFFDVDTLKSIKQSCGKPGKKKSLQQLKPLGLKRQESAPATYTPDLQAEEPATQSDFDESLMLDDDDLANFIPTSDLAYNEFMPEGPSGYQIVDTVDGKPGKEPGTKKSRRLSSPAFFKSPFSKSKNKGYSFNGVKNSHAVHEPTSWEWYRLKRSEKHQQQQQAKLVSKSLPSASLDSSSLSEVNFPLSSSTATTQNSFRILGEAILSSGEGRITPNGNGNAMSGGLASSSSGSGSGGSTTSSTTKKKQRALNNLFRKAFDF

SEQ ID NO: 6657 - DNA, 1983 bp, Arabidopsis thaliana
  CDS (1)..(1983)
atgcaaaggtcgtgtagaactagaagaagagtttctgtgaacaagtttaatggaaggaacagcttttacaaagtctctttgtctcttgtttttctcctttgggttcttctcttcttttccaccttgttgattagtcatggagatggtgccaaagatgagcctttggacgactctatgggaatggctgatccggatgatggtcagtcagatgagaaagttgtgccctttgatggaccattatccttagcgtctgcttctgttgatgttacgtctgatttgagtcggaatgatgatgtaaacctgtctgaagaaagtgaagacaaagaacaggaagcagagatcagtagcacagtttcagggaatgatattgaaagcaaggacacttaccttttgaagcaaagtgagataaataagaaagatacagggattgatgcaggaagcaaatatgatgactttcccaagaaaagtgagattaacaatacaggtacgtggaatgatacagaaggcaaagacgataataactttttgaagcaaagtcaattgaacaagacaggcacagggaatgatacagaaagcagtgacaatgagttcttggagcaaaatcagatgaacaaaacagttttagggaatggtaccgagatcaacgtttcaaaggttgatcaaccatctcgtgcggttccgcttggccttgatgagttcaagagcagagcgtccaattctcgaaacaaatcgttatcagatcaggtcagtggtgtgattcacaggatggagcctggagggaaagagtacaattatgcatctgcttcaaaaggcgcaaaggtcttgtcttccaacaaggaagcaaagggggctgcaagcatcctaagcagggacaatgacaagtacctcagaaatccttgttctactgaaggtaaatttgttgttgtagaactttcagaagaaactttggtaaataccatcaagatcgcgaattttgagcattactcttccaatctgaaagagtttgagcttcaaggcaccctagtttatcccactgatacctgggttcatatgggaaacttcacggcttcaaacgtgaagcatgagcagaacttcacacttcttgagccaaagtgggtgagatacttaaagctaaactttattagtcattatggttcagaattctactgcaccttgagtttaatagaagtctacggtgtggatgccgtagaacgaatgctggaggatttgatatctgtccaggacaacaaaaatgcatacaaaccccgagaaggagattctgagcataaggagaagccaatgcagcaaatagagtcacttgaaggcgatgatggtgctgataagagcacgcacagagagaaagagaaggaagccccaccagagaatatgttagcgaagactgaagcatcaatggcgaagagtagtaataagctgtcagagcccgtggaagagatgaggcatcatcagccagggagcagaatgccaggggacacagtactgaagatactgatgcagaagttaaggtcattggacttgaacctatcgattctagagagatacttagaggaactgaacctgagatacgggaacatattcaaggagatggaccgtgaagccggtgtgagagaaaaggcgattgtggctttgagacttgacttggaaggtatgaaggaaaggcaagaggggatggtgagtgaagcagaggagatgaaagagtggcgaaagagagtggaggcagagatggagaaagcagagaaagagaaggaaaacataagacagagtcttgagcaagtaagtaaaagacttgagtggatggagaagaaatgcttaacggttttcaccgtatgtctagggtttggcattattgcggttattgcagttgtgattggtatgggaactggtctagcagagaagaccggtagtggggcttggctcttgttattgattagctcaacattcattatgttcgttttgtctctttga

SEQ ID NO: 6658 - protein, 660 aa, Arabidopsis thaliana
MQRSCRTRRRVSVNKFNGRNSFYKVSLSLVFLLWVLLFFSTLLISHGDGAKDEPLDDSMGMADPDDGQSDEKVVPFDGPLSLASASVDVTSDLSRNDDVNLSEESEDKEQEAEISSTVSGNDIESKDTYLLKQSEINKKDTGIDAGSKYDDFPKKSEINNTGTWNDTEGKDDNNFLKQSQLNKTGTGNDTESSDNEFLEQNQMNKTVLGNGTEINVSKVDQPSRAVPLGLDEFKSRASNSRNKSLSDQVSGVIHRMEPGGKEYNYASASKGAKVLSSNKEAKGAASILSRDNDKYLRNPCSTEGKFVVVELSEETLVNTIKIANFEHYSSNLKEFELQGTLVYPTDTWVHMGNFTASNVKHEQNFTLLEPKWVRYLKLNFISHYGSEFYCTLSLIEVYGVDAVERMLEDLISVQDNKNAYKPREGDSEHKEKPMQQIESLEGDDGADKSTHREKEKEAPPENMLAKTEASMAKSSNKLSEPVEEMRHHQPGSRMPGDTVLKILMQKLRSLDLNLSILERYLEELNLRYGNIFKEMDREAGVREKAIVALRLDLEGMKERQEGMVSEAEEMKEWRKRVEAEMEKAEKEKENIRQSLEQVSKRLEWMEKKCLTVFTVCLGFGIIAVIAVVIGMGTGLAEKTGSGAWLLLLISSTFIMFVLSL

SEQ ID NO: 6659 - DNA, 24 bp, Artificial sequence
  primer
atggcgaaccgtcttctcatatac

SEQ ID NO: 6660 - DNA, 25 bp, Artificial sequence
  primer
tcatctgattgcttgttgaacaatg

SEQ ID NO: 6661 - protein, 454 aa, Artificial sequence
  consensus sequence
  Variant (4)..(7): Xaa in position 4 to 7 is any amino acid
  Variant (9)..(13): Xaa in position 9 to 13 is any amino acid
  Variant (15)..(16): Xaa in position 15 to 16 is any amino acid
  Variant (18)..(23): Xaa in position 18 to 23 is any amino acid
  Variant (25)..(28): Xaa in position 25 to 28 is any amino acid
  Variant (29)..(29): Xaa in position 29 is any or no amino acid
  Variant (31)..(31): Xaa in position 31 is any amino acid
  Variant (33)..(34): Xaa in position 33 to 34 is any amino acid
  Variant (36)..(36): Xaa in position 36 is any amino acid
  Variant (38)..(45): Xaa in position 38 to 45 is any amino acid
  Variant (46)..(47): Xaa in position 46 to 47 is any or no amino acid
  Variant (50)..(54): Xaa in position 50 to 54 is any amino acid
  Variant (56)..(60): Xaa in position 56 to 60 is any amino acid
  Variant (63)..(63): Xaa in position 63 is any amino acid
  Variant (65)..(66): Xaa in position 65 to 66 is any amino acid
  Variant (69)..(79): Xaa in position 69 to 79 is any amino acid
  Variant (80)..(81): Xaa in position 80 to 81 is any or no amino acid
  Variant (83)..(85): Xaa in position 83 to 85 is any amino acid
  Variant (86)..(87): Xaa in position 86 to 87 is any or no amino acid
  Variant (89)..(91): Xaa in position 89 to 91 is any amino acid
  Variant (93)..(93): Xaa in position 93 is any amino acid
  Variant (95)..(95): Xaa in position 95 is any amino acid
  Variant (97)..(102): Xaa in position 97 to 102 is any amino acid
  Variant (103)..(103): Xaa in position 103 is any or no amino acid
  Variant (105)..(105): Xaa in position 105 is any amino acid
  Variant (107)..(115): Xaa in position 107 to 115 is any amino acid
  Variant (116)..(122): Xaa in position 116 to 122 is any or no amino acid
  Variant (124)..(126): Xaa in position 124 to 126 is any amino acid
  Variant (127)..(130): Xaa in position 127 to 130 is any or no amino acid
  Variant (132)..(134): Xaa in position 132 to 134 is any amino acid
  Variant (136)..(137): Xaa in position 136 to 137 is any amino acid
  Variant (139)..(140): Xaa in position 139 to 140 is any amino acid
  Variant (141)..(147): Xaa in position 141 to 147 is any or no amino acid
  Variant (149)..(151): Xaa in position 149 to 151 is any amino acid
  Variant (153)..(153): Xaa in position 153 is any amino acid
  Variant (155)..(186): Xaa in position 155 to 186 is any amino acid
  Variant (187)..(444): Xaa in position 187 to 444 is any or no amino acid
  Variant (446)..(453): Xaa in position 446 to 453 is any amino acid
YASXXXXAXXXXXNXXAXXXXXXLXXXXXDXYXXNXCXXXXXXXXXXELXXXXXVXXXXXANXEXXSSXXXXXXXXXXXXXPXXXXXWXXXGXFXAXXXXXXXQXFXXXXXXXXXXXXXXXXYXXXXXXXHXXXEXXCXXXXXXXXXSXXXVXGXXXXXXXXXXXXXXXXXXXXXXXXXXXXXXXXXXXXXXXXXXXXXXXXXXXXXXXXXXXXXXXXXXXXXXXXXXXXXXXXXXXXXXXXXXXXXXXXXXXXXXXXXXXXXXXXXXXXXXXXXXXXXXXXXXXXXXXXXXXXXXXXXXXXXXXXXXXXXXXXXXXXXXXXXXXXXXXXXXXXXXXXXXXXXXXXXXXXXXXXXXXXXXXXXXXXXXXXXXXXXXXXXXXXXXXXXXXXXXXXXXXXXXXXXXXXXXXXXXXXXXXXXXXXXXXXXXXXXXXXXXXXXXXXXXKXXXXXXXXL

SEQ ID NO: 6662 - DNA, 1272 bp, Saccharomyces cerevisiae
  CDS (1)..(1272)
atggattctcgagttgcactggtacgaaaatacatagcaccatcggtgataaaaagcgattctattcaattgcacggtttagtgaaggcaccactatttaaagcgttgaatagccgttacaaattaggttcactacagatagtacaggatgtcgattggaatgcgaagacaacaccatccgattctccagagcctctggccgctactctaaactctaatcgatccctaccaatgactaagttccccaagcaggagatcttggaacaggtaaaattggatactaaggttggcaaatggaggaaattcatgacaggttggtttagaattggattgtatcttttaaaaagctataaaacaggaattcagaacacgttaaaagtattctgggatactcgaaacgaagagcagaaattcagcataaaaaacggtgcattggctaacttagtacgggaaatagaaatgcatgaaatcaatacaagactatcgtcttcatcattgcctacaagttcttcagcaaaagccccattaaggccactttcaatcaataggaaaacactggtggaactgatcagacgagatcaaatctggaaattacctgtatttttcaccttagtattcatatttgaggaggtaagtgtattgatctttaccttttttccacgtgtctgtccgtacaattgtttaactcctggtggatacaagaagctttccaactcatatatcaagggaacaacaagcacacaaggtaactacggtctgggtcccttagagtttactaagcaaggtacaattaagtatgagccaccatatgcagttcctattgagaatttgtataattttctgacaagctttcctcaaagtatgatatcaaactggaaactgtatatttataaaaagttaaaattacagaagctactttgcaatgagatagaaaaaatttaccagtatctgtttatcgatgactggttgctgttgcagagtatactcaacactgatgttgagaaaactaaaatcgcgctaagtgatagagaattggttaactgtatacttgaaagaaaactttatcacatgggcgatgacttgaatgagatggttaatgacacgttagggaaagaaatcttactgaaaagattgtttctttattggacattaagatataatgacactatatccttaaacggaaagcatacattcagtgagaaatggggtgtcaacaatatatcattgttaaaatataattcagaattggtagctacgaaagatattcaatag

SEQ ID NO: 6663 - protein, 423 aa, Saccharomyces cerevisiae
MDSRVALVRKYIAPSVIKSDSIQLHGLVKAPLFKALNSRYKLGSLQIVQDVDWNAKTTPSDSPEPLAATLNSNRSLPMTKFPKQEILEQVKLDTKVGKWRKFMTGWFRIGLYLLKSYKTGIQNTLKVFWDTRNEEQKFSIKNGALANLVREIEMHEINTRLSSSSLPTSSSAKAPLRPLSINRKTLVELIRRDQIWKLPVFFTLVFIFEEVSVLIFTFFPRVCPYNCLTPGGYKKLSNSYIKGTTSTQGNYGLGPLEFTKQGTIKYEPPYAVPIENLYNFLTSFPQSMISNWKLYIYKKLKLQKLLCNEIEKIYQYLFIDDWLLLQSILNTDVEKTKIALSDRELVNCILERKLYHMGDDLNEMVNDTLGKEILLKRLFLYWTLRYNDTISLNGKHTFSEKWGVNNISLLKYNSELVATKDIQ

SEQ ID NO: 6664 - DNA, 1209 bp, Eremothecium gossypii
  CDS (1)..(1209)
atgctaagctcgagtaggacggtcatacagaagtgggcaagtcatggctgcatacgtcaggcgtctgcaaggcattttgcactttcgggagaggacaaggcgttgctgaagcagctaagcgacacacttggcaagataaagatcacaagctcggaggcggaggcggcatcagacttcaattcgacgagatcgttgccggtcacgatttttcccaggcagcaaatagcgcgggaagtagaacaggacagtaagatcggcagatggaggaaaccagcggtaaaattgtggaggttaggcactgcgatgctacgtaactaccgtatcgggttttccaacacttatcgggtattttgggacacacggcgcctgccagaaaagctggacaccgacctattccgcgcaatcgaatacatggagatggcggcgcgggcggcgcacactcctgtttcacttccgcagctgggatatgagcgacggcaggttcaggagtggcggcggcgggaacagttctggaagctgccattgttcggggtgctggtgctggtgtttgaggagctggtcgtcggactggtctacctgtggcccggtttgtgtccgtggaactgcctacttccgaacgcataccagcgtgtgtcagacaggcggacagaacggttggccgtgccggtggagcccactcgggcccaacagtattgctctgtatatggtatcccgcgggatgccctcctgcagtacctgagaacgtttggcctgatatcccattttcagcaactggtgtaccgcctctctggaaatgtatacattccagccgagaggctgcagcgttggcaacagtacctttttgtggataactggatgatacttcgctcattgctggaaactgagaagacactggcaataagtgaccgggagctggtcaatatcatctttgagcggcagttgttcgaaaaaggcgaaaatctgaactcacttgttcatgatgatagcggtcgcatgctacttctgcagagactccttacatacttgagctggcaattcagcggtacagtcactgttggcggtgataaactgtacagcgagaaatggggcgctaataatattagcgtgatgaattttccaggaccagctgagatccgttccgttgctgcggtggttgagcagcaactgacgcaagcattaagcctacaaactaaaattgagagtaaataa

SEQ ID NO: 6665 - protein, 402 aa, Eremothecium gossypii
MLSSSRTVIQKWASHGCIRQASARHFALSGEDKALLKQLSDTLGKIKITSSEAEAASDFNSTRSLPVTIFPRQQIAREVEQDSKIGRWRKPAVKLWRLGTAMLRNYRIGFSNTYRVFWDTRRLPEKLDTDLFRAIEYMEMAARAAHTPVSLPQLGYERRQVQEWRRREQFWKLPLFGVLVLVFEELVVGLVYLWPGLCPWNCLLPNAYQRVSDRRTERLAVPVEPTRAQQYCSVYGIPRDALLQYLRTFGLISHFQQLVYRLSGNVYIPAERLQRWQQYLFVDNWMILRSLLETEKTLAISDRELVNIIFERQLFEKGENLNSLVHDDSGRMLLLQRLLTYLSWQFSGTVTVGGDKLYSEKWGANNISVMNFPGPAEIRSVAAVVEQQLTQALSLQTKIESK

SEQ ID NO: 6666 - DNA, 1140 bp, Candida glabrata CBS138
  CDS (1)..(1140)
atgcaaattgcagctcgaaacaacctactttggattgcaacaaggcatagtagtaatactgttcaagccaaccgattatttgaactgtacaaaaatgggaaactgcaggtagtaacctcccataccaagatacaagatgatttcaattcaactagatcgttacctatggtagagttccccaaaaaccggatattcacagaggttgagaacgatacaaaagtaggcaactggaggaaacctattaccaagtactatcgacttggtatttcgcttctaaaattttacagagatgggattcaaaatacatatgcagtttatcgcgatagccgtcgcttcctcaagggttttggctcccaaaactataaagatgcaataccctccatgctcagaataatcgaatctcaagagctgcaactaaaaagaaatgtattaacaaataacaccaatgatttagcatttaagagagctgatttagtggaaatgatgagaagaaatgagatatataagctaccaaacttcttcattatatgtctggtttttgaagaattgacagctgtgctatgctatttctttcctcaagttgctccaagaaattgtatgacacctggtggatacttcaaaatatctaacaaaaaaatcgagcaattcaagaaacttaccagagaagtaattacggatagcgaacaatatttaccgccctatgcactttcaaattcccagatttatggtatcattaaaaactcggaaatgcctatttcaagaggaaagttgtatttacgcaatatgtttaatataaaggataaattgatacaggacttaactatatggtatcaatacatttatattgatgattggtatctagtaacaactctactgaaagggaaggaactacgtttagatagatcagagcttgtaaattgcatttatgaacgtaaactgtaccaaaaaggtgaaaatttaaacgaaatgatgctatcgaaagaaggtactgataccctggttcgcagattaatagattactggtcatataggtttggtaacacaatcattatcgatggaaaactcacctttaatgaaaagtggggaattacaaacttaaagtccatgctccctgagaatacgttaacaataggtcgataa

SEQ ID NO: 6667 - protein, 379 aa, Candida glabrata CBS138
MQIAARNNLLWIATRHSSNTVQANRLFELYKNGKLQVVTSHTKIQDDFNSTRSLPMVEFPKNRIFTEVENDTKVGNWRKPITKYYRLGISLLKFYRDGIQNTYAVYRDSRRFLKGFGSQNYKDAIPSMLRIIESQELQLKRNVLTNNTNDLAFKRADLVEMMRRNEIYKLPNFFIICLVFEELTAVLCYFFPQVAPRNCMTPGGYFKISNKKIEQFKKLTREVITDSEQYLPPYALSNSQIYGIIKNSEMPISRGKLYLRNMFNIKDKLIQDLTIWYQYIYIDDWYLVTTLLKGKELRLDRSELVNCIYERKLYQKGENLNEMMLSKEGTDTLVRRLIDYWSYRFGNTIIIDGKLTFNEKWGITNLKSMLPENTLTIGR

SEQ ID NO: 6668 - DNA, 1188 bp, Kluyveromyces lactis NRRL Y-1140
  CDS (1)..(1188)
atgactgtggccaacagggttggatatatcgtcaagcgcggatacagtacacagagaacaccaatcgatatatcttcgaactctgcgtttaaagaatctttagcttcaaacgctcttttgaatcgtctataccaactgaatcaaaatggaaagatagctataaaagtatactctgacaaatgccccgaaactaatctaaatgtgagtgcgacattaccagtaacacatattcctactacaaaaataactgatgcggttaaacaggatgactctatttcaaactggagaaaacctcttgtgaaatggtttcgacttggtaaatttgtattagggatgtataaagtcggagtcaaatccacctggtctacctatttcgactccaagggattcaaatataccgtcaatgagttaacgaaattaatagagttcaaagaaatagaaagtagagtgctgaaacagaataaattcgatgagattgatcttacaagaaaacaatatcttcaatggcttcgtagaaaagagttttggaaaataccaagatttctgatagcttttatcatgtttgaggaggttacaccgttattgtgttatattttcccatccctttcaccctggaattgtttaatgccaggtctttatcgaaggattagtgactcaagaagcaaaaaattggtagataattttgaaatagaaaagtcatacatttcgccttatgaactagataagactgctgtctctcaattcttaacaaaacaaaatattatgcctagttggagaatgggcatttataacattaccaaagagtttaaaatcccattactaaaagtagttgaaactaatcaaaagattatgatcgatgattggttacttctacgtgaattgttgagagatagtgaggagcctaccattttaagtgatagagaacttgtagatgctatcgctagacggcagttatatcaaaagggcgaagatttgaataaaatggtggaaaacatagagcaacaaaaggttttaaaactaaggctcttactttatttaagttttaaatttgagggaactgttgctgccgatatttttggcggaaagctactggcagaaaggtggggcgtcaacaatatggcaattttcaactttcctgggtctaatgagttgttaaaagcggaacatctgaaaaatattggtttgtga

SEQ ID NO: 6669 - protein, 395 aa, Kluyveromyces lactis NRRL Y-1140
MTVANRVGYIVKRGYSTQRTPIDISSNSAFKESLASNALLNRLYQLNQNGKIAIKVYSDKCPETNLNVSATLPVTHIPTTKITDAVKQDDSISNWRKPLVKWFRLGKFVLGMYKVGVKSTWSTYFDSKGFKYTVNELTKLIEFKEIESRVLKQNKFDEIDLTRKQYLQWLRRKEFWKIPRFLIAFIMFEEVTPLLCYIFPSLSPWNCLMPGLYRRISDSRSKKLVDNFEIEKSYISPYELDKTAVSQFLTKQNIMPSWRMGIYNITKEFKIPLLKVVETNQKIMIDDWLLLRELLRDSEEPTILSDRELVDAIARRQLYQKGEDLNKMVENIEQQKVLKLRLLLYLSFKFEGTVAADIFGGKLLAERWGVNNMAIFNFPGSNELLKAEHLKNIGL

SEQ ID NO: 6670 - DNA, 1200 bp, Candida albicans SC5314
  CDS (1)..(1200): transl_table=12
atgaacaaatcacctagattctacaggttgcctagcaaaaaactggtattcttgaacgaattaagtaagtcaccaagattatcatcaatttggcagtctgttgattcaagatgtatgaatgcaacaaaaaccttacccattattatacagaccaaacaggagattttcaaccaggtagtccagagcaacccagaaaaacaaggagtttctttaaaatttaaacaatttattgcctacggaaaggcaattatcaatttctacaaatcgggaatcaaaaatgtgtggcagaatcagagtatattaaagaagctaaagcaagatttttatttgactcacgtcgccccatcaggacaagaaataaaaattaggattccatcctttaaaaaattaacggaagaaatgagtcaaagaatatatatgaataaagtagaatcagaaactttggaaaaaatgactaaaggtgatattaagagatcgaatgatatgaaaactcattctattttcaacttgacaagagagcagtttcaactttacaaacgtactccaaatgactattacaaaataccattatttgcacttgtgtgcttgatatttgaggaactcactcctgttttatgttatatgattccagaaataacgccatctacttgtatattacccaacatccttcctcgggtctggaatccaaacgcaatcggtaagatgaaatcactcaatcaaaacctagacgagaatagtatgattgatttgtctttgaaaacaagctataatttggacattgagcatgttcggttgctatctcaatcattgcgtttagtatctcggtatatacccccacagttttatcctgacggatatttacgtgataaactacaagactactacaattacatagttattgacaatttttatttgtcaggcttgaacggagatggcaacatgtggaatctcaacgaccaagagctagtgttggcttgtttagaaagaaaccttattcaaaatattgtctacgataccaaattgttcaatcaaatatccgatcctatccaaaaacaaatgtttcaggacaagtacatgggtaaactaagagttaaactattccaatatttggtggattttgatagttttaatattggatatcttgctgtgaatcatgccatcccaagggaagaagaagtaaatgtaattgcatggaggtaa

SEQ ID NO: 6671 - protein, 399 aa, Candida albicans SC5314
MNKSPRFYRLPSKKSVFLNELSKSPRLSSIWQSVDSRCMNATKTLPIIIQTKQEIFNQVVQSNPEKQGVSLKFKQFIAYGKAIINFYKSGIKNVWQNQSILKKLKQDFYLTHVAPSGQEIKIRIPSFKKLTEEMSQRIYMNKVESETLEKMTKGDIKRSNDMKTHSIFNLTREQFQLYKRTPNDYYKIPLFALVCLIFEELTPVLCYMIPEITPSTCILPNILPRVWNPNAIGKMKSLNQNLDENSMIDLSLKTSYNLDIEHVRLLSQSLRLVSRYIPPQFYPDGYLRDKLQDYYNYIVIDNFYLSGLNGDGNMWNLNDQELVLACLERNLIQNIVYDTKLFNQISDPIQKQMFQDKYMGKLRVKLFQYLVDFDSFNIGYLAVNHAIPREEEVNVIAWR

SEQ ID NO: 6672 - DNA, 24 bp, Artificial sequence
  primer
atggattctcgagttgcactggta

SEQ ID NO: 6673 - DNA, 25 bp, Artificial sequence
  primer
ctattgaatatctttcgtagctacc

SEQ ID NO: 6674 - protein, 385 aa, Artificial sequence
  consensus sequence
  Variant (2)..(16): Xaa in position 2 to 16 is any amino acid
  Variant (18)..(20): Xaa in position 18 to 20 is any amino acid
  Variant (22)..(23): Xaa in position 22 to 23 is any amino acid
  Variant (24)..(35): Xaa in position 24 to 35 is any or no amino acid
  Variant (37)..(43): Xaa in position 37 to 43 is any amino acid
  Variant (44)..(44): Xaa in position 44 is any or no amino acid
  Variant (46)..(48): Xaa in position 46 to 48 is any amino acid
  Variant (52)..(55): Xaa in position 52 to 55 is any amino acid
  Variant (57)..(59): Xaa in position 57 to 59 is any amino acid
  Variant (61)..(63): Xaa in position 61 to 63 is any amino acid
  Variant (65)..(66): Xaa in position 65 to 66 is any amino acid
  Variant (68)..(72): Xaa in position 68 to 72 is any amino acid
  Variant (76)..(78): Xaa in position 76 to 78 is any amino acid
  Variant (80)..(81): Xaa in position 80 to 81 is any amino acid
  Variant (83)..(83): Xaa in position 83 is any amino acid
  Variant (85)..(87): Xaa in position 85 to 87 is any amino acid
  Variant (89)..(90): Xaa in position 89 to 90 is any amino acid
  Variant (92)..(93): Xaa in position 92 to 93 is any amino acid
  Variant (95)..(97): Xaa in position 95 to 97 is any amino acid
  Variant (99)..(103): Xaa in position 99 to 103 is any amino acid
  Variant (105)..(118): Xaa in position 105 to 118 is any amino acid
  Variant (119)..(127): Xaa in position 119 to 127 is any or no amino acid
  Variant (130)..(131): Xaa in position 130 to 131 is any amino acid
  Variant (133)..(149): Xaa in position 133 to 149 is any amino acid
  Variant (150)..(158): Xaa in position 150 to 158 is any or no amino acid
  Variant (160)..(166): Xaa in position 160 to 166 is any amino acid
  Variant (169)..(172): Xaa in position 169 to 172 is any amino acid
  Variant (173)..(173): Xaa in position 173 is any or no amino acid
  Variant (175)..(175): Xaa in position 175 is any amino acid
  Variant (177)..(177): Xaa in position 177 is any amino acid
  Variant (179)..(184): Xaa in position 179 to 184 is any amino acid
  Variant (188)..(191): Xaa in position 188 to 191 is any amino acid
  Variant (193)..(193): Xaa in position 193 is any amino acid
  Variant (195)..(196): Xaa in position 195 to 196 is any amino acid
  Variant (198)..(200): Xaa in position 198 to 200 is any amino acid
  Variant (202)..(202): Xaa in position 202 is any amino acid
  Variant (205)..(206): Xaa in position 205 to 206 is any amino acid
  Variant (208)..(209): Xaa in position 208 to 209 is any amino acid
  Variant (211)..(213): Xaa in position 211 to 213 is any amino acid
  Variant (215)..(230): Xaa in position 215 to 230 is any amino acid
  Variant (231)..(242): Xaa in position 231 to 242 is any or no amino acid
  Variant (244)..(246): Xaa in position 244 to 246 is any amino acid
  Variant (248)..(264): Xaa in position 248 to 264 is any amino acid
  Variant (265)..(266): Xaa in position 265 to 266 is any or no amino acid
  Variant (268)..(288): Xaa in position 268 to 288 is any amino acid
  Variant (289)..(291): Xaa in position 289 to 291 is any or no amino acid
  Variant (294)..(295): Xaa in position 294 to 295 is any amino acid
  Variant (298)..(298): Xaa in position 298 is any amino acid
  Variant (300)..(300): Xaa in position 300 is any amino acid
  Variant (302)..(303): Xaa in position 302 to 303 is any amino acid
  Variant (304)..(305): Xaa in position 304 to 305 is any or no amino acid
  Variant (307)..(312): Xaa in position 307 to 312 is any amino acid
  Variant (313)..(316): Xaa in position 313 to 316 is any or no amino acid
  Variant (318)..(318): Xaa in position 318 is any amino acid
  Variant (320)..(320): Xaa in position 320 is any amino acid
  Variant (324)..(325): Xaa in position 324 to 325 is any amino acid
  Variant (327)..(327): Xaa in position 327 is any amino acid
  Variant (330)..(330): Xaa in position 330 is any amino acid
  Variant (332)..(334): Xaa in position 332 to 334 is any amino acid
  Variant (336)..(337): Xaa in position 336 to 337 is any amino acid
  Variant (340)..(350): Xaa in position 340 to 350 is any amino acid
  Variant (352)..(353): Xaa in position 352 to 353 is any amino acid
  Variant (356)..(357): Xaa in position 356 to 357 is any amino acid
  Variant (359)..(365): Xaa in position 359 to 365 is any amino acid
  Variant (367)..(370): Xaa in position 367 to 370 is any amino acid
  Variant (371)..(372): Xaa in position 371 to 372 is any or no amino acid
  Variant (374)..(378): Xaa in position 374 to 378 is any amino acid
  Variant (380)..(380): Xaa in position 380 is any amino acid
  Variant (383)..(384): Xaa in position 383 to 384 is any amino acid
LXXXXXXXXXXXXXXXGXXXIXXXXXXXXXXXXXXSXXXXXXXXNXXXSLPXXXXPXXXIXXXVXXDXXXXXWRKXXXKXXRXGXXXLXXYXXGXXXTXXXXXDXXXXXXXXXXXXXXXXXXXXXXXIEXXEXXXXXXXXXXXXXXXXXXXXXXXXXXRXXXXXXXRRXXXXXKXPXFXXXXXXFEEXXXXLXYXXPXXXPXNCXXPXXYXXXSXXXXXXXXXXXXXXXXXXXXXXXXXXXXYXXXYXXXXXXXXXXXXXXXXXXXSXXXXXXXXXXXXXXXXXXXXXXXXQYXXIDXWXLXXXXLXXXXXXXXXXLXDXELVXXIXERXLXXXGXXLNXXXXXXXXXXXLXXRLXXYXXXXXXXTXXXXXXGXXXXXEXWGXXN

SEQ ID NO: 6675 - DNA, 177 bp, Saccharomyces cerevisiae
  CDS (1)..(177)
atgtcgcagaaggatttggcaaccaaaattaacgaaaagccaaccgtggtaaacgattatgaagccgctagagctattccaaaccaacaagttttgtctaagttggaaagagccttaggcgttaaattgagaggtaacaacatcggttcgcctttgggagctccaaagaagaaatga

SEQ ID NO: 6676 - protein, 58 aa, Saccharomyces cerevisiae
MSQKDLATKINEKPTVVNDYEAARAIPNQQVLSKLERALGVKLRGNNIGSPLGAPKKK

SEQ ID NO: 6677 - DNA, 447 bp, Xenopus tropicalis
  CDS (1)..(447)
atggcggagagcgactgggataccgtgaccgtgctcaggaagaagggccccaccgccgcgcaggccaagtccaagcaggccataacagccgctcagagacgaggggaagaggtagagacgtcaaaaaaatggtcggccggacagaacaagcagcacacaatcaccaaaaatacagccaagctggacagagaaacggaggagcttcaccacgatagggtgcccctggaagtgggcaaagtcatccagcaggggcggcagggcaagggcatgaaccagaaggacctggcaacgaaaatcaatgagaagccgcaagtgatcgccgattacgagagcggaaaggccattcccaacaaccaggtgctgggcaagatcgagcgggctatagggctgaagctgcgcgggagagacattggaaaacccctcgatcccatcgtgaaaaagaattga

SEQ ID NO: 6678 - protein, 148 aa, Xenopus tropicalis
MAESDWDTVTVLRKKGPTAAQAKSKQAITAAQRRGEEVETSKKWSAGQNKQHTITKNTAKLDRETEELHHDRVPLEVGKVIQQGRQGKGMNQKDLATKINEKPQVIADYESGKAIPNNQVLGKIERAIGLKLRGRDIGKPLDPIVKKN

SEQ ID NO: 6679 - DNA, 447 bp, Arabidopsis thaliana
  CDS (1)..(447)
atgccgagcagatacccaggagcagtaacacaagactgggaaccagtagttctccacaaatcaaaacaaaagagccaagacctacgcgatccgaaagcggttaacgcagctctgagaaacggtgtcgcggttcaaacggttaagaaattcgatgccggttcgaacaaaaaggggaaatctacggcggttccggtgattaacacgaagaagctggaagaagaaacagagcctgcggcgatggatcgtgtgaaagcagaggtgaggttgatgatacagaaagcgagattggagaagaagatgtcacaagcggatttggcgaaacagatcaatgagaggactcaggtagttcaggaatatgagaatggtaaagctgttcctaatcaggctgtgcttgcgaagatggagaaggttctaggtgttaaacttaggggtaaaattgggaaatga

SEQ ID NO: 6680 - protein, 148 aa, Arabidopsis thaliana
MPSRYPGAVTQDWEPVVLHKSKQKSQDLRDPKAVNAALRNGVAVQTVKKFDAGSNKKGKSTAVPVINTKKLEEETEPAAMDRVKAEVRLMIQKARLEKKMSQADLAKQINERTQVVQEYENGKAVPNQAVLAKMEKVLGVKLRGKIGK

SEQ ID NO: 6681 - DNA, 429 bp, Arabidopsis thaliana
  CDS (1)..(429)
atggccggaattggaccgattactcaggattgggaaccagttgtgatccgcaagagagctcctaacgctgcagctaagcgcgacgagaagactgtcaacgccgctcgtcgaagcggcgccgatattgagaccgttcgaaaattcaatgctggatcgaacaaggctgcatcaagcggcacctccttgaacacaaagaagctagatgatgatactgagaacttatctcatgatcgtgtgcccactgaattgaagaaagccatcatgcaagctagaggggagaagaagctgactcagtcccaacttgcccatctgatcaatgagaagccacaagtgatccaagaatacgagtctgggaaagcaattccgaatcaacagatcctttcaaagctggagagggcacttggtgctaaactccgtggaaagaagtag

SEQ ID NO: 6682 - protein, 142 aa, Arabidopsis thaliana
MAGIGPITQDWEPVVIRKRAPNAAAKRDEKTVNAARRSGADIETVRKFNAGSNKAASSGTSLNTKKLDDDTENLSHDRVPTELKKAIMQARGEKKLTQSQLAHLINEKPQVIQEYESGKAIPNQQILSKLERALGAKLRGKK

SEQ ID NO: 6683 - DNA, 471 bp, Caenorhabditis elegans
  CDS (1)..(471)
atgtccaagtatggctgcccaacctctgacactgatccaaactcggtcacaatgattacgaagcgaggaccagtgaacaagacattgaaatcggctgctcaattgaatgctgctcagcgtgctggagttgatatttcgaccgaaaagaagacgatgtctggtggcaatcgccagcacagcgccaacaagaacactctgcggcttgatgaagaaacggaggagcttcatcaccagaaagttgctctgtccctcggaaaagtcatgcagcaggctcgtgccacgaaaggttggacgcagaaagatctttcaacgcaaattaatgagaagccgcaagtagtcggcgaatacgaaagcggaaaggctgtcccaaatcaacagatcatggcaaaaatggagcgtgcgcttggagtcaagttgcgcggcaaagatatcggaatgccattttcaacaaagccaccagcgaagaagtga

SEQ ID NO: 6684 - protein, 156 aa, Caenorhabditis elegans
MSKYGCPTSDTDPNSVTMITKRGPVNKTLKSAAQLNAAQRAGVDISTEKKTMSGGNRQHSANKNTLRLDEETEELHHQKVALSLGKVMQQARATKGWTQKDLSTQINEKPQVVGEYESGKAVPNQQIMAKMERALGVKLRGKDIGMPFSTKPPAKK

SEQ ID NO: 6685 - DNA, 429 bp, Arabidopsis thaliana
  CDS (1)..(429)
atggccggaattggaccgataactcaggattgggagccggtggtgatccgtaagaaacccgctaacgccgctgccaagcgcgacgagaaaactgtcaacgccgctcgtcgatccggcgccgatatcgagaccgtcagaaaattcaatgctggaaccaacaaggcggcatcaagcggcacatctctgaacacaaaaatgcttgatgatgacactgagaaccttactcatgaacgtgtgcctactgagctaaagaaagccattatgcaagccaggacagacaagaagctaacccagtcccaacttgctcaaatcatcaatgagaagccacaagtgattcaagagtatgagtctggcaaagctatacccaaccagcaaatcctttctaagctggagagagcgcttggagctaagcttcgtggaaagaagtga

SEQ ID NO: 6686 - protein, 142 aa, Arabidopsis thaliana
MAGIGPITQDWEPVVIRKKPANAAAKRDEKTVNAARRSGADIETVRKFNAGTNKAASSGTSLNTKMLDDDTENLTHERVPTELKKAIMQARTDKKLTQSQLAQIINEKPQVIQEYESGKAIPNQQILSKLERALGAKLRGKK

SEQ ID NO: 6687 - DNA, 420 bp, Homo sapiens
  CDS (1)..(420)
atggccgagagcgactgggacacggtgacggtgctgcgcaagaagggccctacggccgcccaggccaaatccaagcaggctatcttagcggcacagagacgaggagaagatgtggagacttccaagaaatgggctgctggccagaacaaacaacattctattaccaagaacacggccaagctggaccgggagacagaggagctgcaccatgacagggtgaccctggaggtgggcaaggtgatccagcaaggtcggcagagcaaggggcttacgcagaaggacctggccacgaaaatcaatgagaagccacaggtgatcgcggactatgagagcggacgggccatacccaataaccaggtgcttggcaaaatcgagcgggccattggtgagtgtccctccacccttcgccgggtccgctga

SEQ ID NO: 6688 - protein, 139 aa, Homo sapiens
MAESDWDTVTVLRKKGPTAAQAKSKQAILAAQRRGEDVETSKKWAAGQNKQHSITKNTAKLDRETEELHHDRVTLEVGKVIQQGRQSKGLTQKDLATKINEKPQVIADYESGRAIPNNQVLGKIERAIGECPSTLRRVR

SEQ ID NO: 6689 - DNA, 438 bp, Drosophila melanogaster
  CDS (1)..(438)
atgtcggactgggactctgtgactgttcttcggaagaaagcaccgaaatcgtcgaccctcaagacggaatcggcggtcaaccaggcacgccgtcaaggagtcgccgtggatacccaacagaagtatggtgctggcaccaacaagcagcatgtgaccaccaagaacactgccaaactagaccgcgagaccgaggagctgcgccacgacaagattcccctcgatgtgggcaagctcatccagcagggacgacagagcaagggcctcagccaaaaggacctggcaactaaaatctgcgaaaagcagcaagtggtaaccgactacgaggccggtcgcggtattccaaacaacttgattctgggtaaaatggaacgcgttctcggcattaagctgcgcggcaaggagcgcggccaaccaatagcacctcccggtaaaaagtga

SEQ ID NO: 6690 - protein, 145 aa, Drosophila melanogaster
MSDWDSVTVLRKKAPKSSTLKTESAVNQARRQGVAVDTQQKYGAGTNKQHVTTKNTAKLDRETEELRHDKIPLDVGKLIQQGRQSKGLSQKDLATKICEKQQVVTDYEAGRGIPNNLILGKMERVLGIKLRGKERGQPIAPPGKK

SEQ ID NO: 6691 - DNA, 594 bp, Kluyveromyces lactis NRRL Y-1140
  CDS (1)..(594)
atggattttagacccaaatgttgcgttgttgtaaggtacaagataagaagagtaacaacgtatacaaacgctactactgtaccacgtatttgtagtatacttttgaatccggtgaaaaagaaaacagttcaaaaaagagaaatgtctgaatgggaacccagcacagtgattggccgtaaggttagaattggcggtggtggtcctcgccagcaggtggcaagaacacagggtcaaatcaacgaggctagaaggtctggtatggttctgtccgtcgataagaagtacggtactactaattctaagtcctccccagaaggccaacggttgaccaaagtggaccgtgaaaccgatattgtgaaaccaaaaaagatcgacgtcagcgttggtaaagctattcagaagggtagacaagacaagaacctaacacagaaggacttggctactaagattaacgagaagccaactatcgtcaacgattatgaatccggtaggggtattcctaaccagcagattttgggtaagatggagcgtgccttgggtatcaagttgcgtggtaagaacattggtgagcctttgggcggtccaaagaaatag

SEQ ID NO: 6692 - protein, 197 aa, Kluyveromyces lactis NRRL Y-1140
MDFRPKCCVVVRYKIRRVTTYTNATTVPRICSILLNPVKKKTVQKREMSEWEPSTVIGRKVRIGGGGPRQQVARTQGQINEARRSGMVLSVDKKYGTTNSKSSPEGQRLTKVDRETDIVKPKKIDVSVGKAIQKGRQDKNLTQKDLATKINEKPTIVNDYESGRGIPNQQILGKMERALGIKLRGKNIGEPLGGPKK

SEQ ID NO: 6693 - DNA, 738 bp, Rattus norvegicus
  CDS (1)..(738)
atgaaagaagccgtccagcagcttcgaattcctccgcagtcagcagggaaaagaaaagatttccacattgcgtcacaagagaagctgcaaaccaggactcactggtcccatcctcggacaaaagctacgtgggaacaactggagtcctggcgtatcacagacttggaaagaaatgataaacaatgccaggaccgcgaggcacactgcccctcccacccagaaaaacttctgtgccctccacctccacaagaactgccgacactcaagagccagtatgcaaaaacagcaaaggtgtacaaatggggcaccatgcagcattccacgcgtcagacagtggtgaagggtctcactgtagatcattatgcctcgaacaagcagcatcccatcactaaaaacacagccaagagcaaaggcctgacgcagaaggacctggccacaaaaatcaataaaaagctgcaagtcatctcagcctatgaaagtgtacaggccattctgaataacccaaatttgggcaaaactgaaagaaccatcagcctcaagttccggaggaaggacatcaggaaatctatcgaagggggccgaaggcaaaatgaacacaaagcctcgaaaccaatggttctagctgagctcttctggctgctcccccaggactaccagcactgctgtgggtctcctcccatggtcaaatggaacatagggtcaggcttgtgtgcccccccaacccacagctgctgctaa

SEQ ID NO: 6694 - protein, 245 aa, Rattus norvegicus
MKEAVQQLRIPPQSAGKRKDFHIASQEKLQTRTHWSHPRTKATWEQLESWRITDLERNDKQCQDREAHCPSHPEKLLCPPPPQELPTLKSQYAKTAKVYKWGTMQHSTRQTVVKGLTVDHYASNKQHPITKNTAKSKGLTQKDLATKINKKLQVISAYESVQAILNNPNLGKTERTISLKFRRKDIRKSIEGGRRQNEHKASKPMVLAELFWLLPQDYQHCCGSPPMVKWNIGSGLCAPPTHSCC

SEQ ID NO: 6695 - DNA, 444 bp, Apis mellifera
  CDS (1)..(444)
atgtcagactgggacactactcctattactctgcgaaaacgtcccccaaaagcttcagtacttaaatcggaacaagcagtgaatgctgcacgtcgtcaaggtttcgtggtcgaaactcaagcaaaatggggtggaggaacaaataaacaacacgtagcaactaaaaacactgctaaattggatagagaaacagaagaattaaaacatgataaaattccacttgatcttggtaaattaattcaacagggaagacaaagtaaaggattatctcaaaaagatcttgcaacaaaagtgaatgaaaaagcacaagttatcaatgactatgaagcaggtcgtggaataccaaatcaaatggtgattggcaaaattgaacgagtgttgggaataaaattacgtggcaaagatcgtggtaaaccattatcaactcctgggaataaaaagtga

SEQ ID NO: 6696 - protein, 147 aa, Apis mellifera
MSDWDTTPITLRKRPPKASVLKSEQAVNAARRQGFVVETQAKWGGGTNKQHVATKNTAKLDRETEELKHDKIPLDLGKLIQQGRQSKGLSQKDLATKVNEKAQVINDYEAGRGIPNQMVIGKIERVLGIKLRGKDRGKPLSTPGNKK

SEQ ID NO: 6697 - DNA, 480 bp, Cryptosporidium parvum
  CDS (1)..(480)
atgcaaaaaattactctactgaatcatatttcaaaaatgagtcaggattggaatcaagtggtatggaaaaaaggtggttctagaccaaaaggaatatcaaaagaacaagatcttaatcaagcaagaagaaaaggtgaagaaatcattaccgagaaaaaatttcttggaggtagaaatgcatcaactaaacaaaatatccctcaaaatgctgccaaattagacgaagatactggtgactatcgtatcttcagagtttctggggaattttctagagctttacaacaagctagagttgcaaaaaagctcactcaggctcaacttgcacaaatgattaacgaaaaagctagtgttgttaatgattatgaatctggaaaggctattccaaaccctatattggttcaaaagatgtccagatgtttgggagtcaatttaccaaagcccgccccaaagaaaaagcctgataataataataatgattaa

SEQ ID NO: 6698 - protein, 159 aa, Cryptosporidium parvum
MQKITLLNHISKMSQDWNQVVWKKGGSRPKGISKEQDLNQARRKGEEIITEKKFLGGRNASTKQNIPQNAAKLDEDTGDYRIFRVSGEFSRALQQARVAKKLTQAQLAQMINEKASVVNDYESGKAIPNPILVQKMSRCLGVNLPKPAPKKKPDNNNND

SEQ ID NO: 6699 - DNA, 411 bp, Plasmodium chabaudi
  CDS (1)..(411)
atgcaacaccaagatcttaagccagttatatggaccaaaaatgacaaaaaaacgaaaccaaagaatattgacgaggctcgtaaattaggtatggatgttgaagtggaaaaaaaattcttaggaggtaaaaataaatcatgtaaaggaaatttaataatagaaaataaagcgaaaattgaacaagagacggaaaattttaaaatcgatagagttacacctgctttttcaagagctttacaacaagctagaatggctaaaaaattaacacaagtccaattagcaagacttgtcaatgaacctgaaagtgttattaaagaatatgaaaatggtaaggcaataccaaataatatgattattcaaaaactaaatagagtactaggtgttaatttaccttctccaaaaaaaaaataa

SEQ ID NO: 6700 - protein, 136 aa, Plasmodium chabaudi
MQHQDLKPVIWTKNDKKTKPKNIDEARKLGMDVEVEKKFLGGKNKSCKGNLIIENKAKIEQETENFKIDRVTPAFSRALQQARMAKKLTQVQLARLVNEPESVIKEYENGKAIPNNMIIQKLNRVLGVNLPSPKKK

SEQ ID NO: 6701 - DNA, 501 bp, Trypanosoma cruzi
  CDS (1)..(501)
atgccccgtggccaaattatgacggggcaggattgggagccccaggtgtttaactttcagaacaggaacaacaccaataagaagcctggtcgcgtgagtgaagccgaagctaatcgtgtgctgcaacgcggtggaaatgtagatgttgtgaagagggaacacttccatgcaaatgcacagaagacggatcttggcgccaacgcaaagcggatagacgaggacaacgagactttgaaagtgaagcgtattgataataacttacgcataaatattcagaaggcgcgccaggcaaagggatggacgcagcaggatctagcgcgaaacatcgcggagcgggccggggttgtgacggagtatgagaacgggaaggcggtgccagaggagcgggtgctggtaaagatggagaaggcgttgggcgttcatctgcgtggggtgaaggctggacagccatttggtggcattcaccagcagccacagcaaatgaaaaaggccgcgaaatag

SEQ ID NO: 6702 - protein, 166 aa, Trypanosoma cruzi
MPRGQIMTGQDWEPQVFNFQNRNNTNKKPGRVSEAEANRVLQRGGNVDVVKREHFHANAQKTDLGANAKRIDEDNETLKVKRIDNNLRINIQKARQAKGWTQQDLARNIAERAGVVTEYENGKAVPEERVLVKMEKALGVHLRGVKAGQPFGGIHQQPQQMKKAAK

SEQ ID NO: 6703 - DNA, 483 bp, Trypanosoma brucei
  CDS (1)..(483)
atggctcgcggtcaaatcatgacgggccaggactgggagccgcaagtgtttaacatccacaacaggaaaaacactcagcagaggccgactcgtgtaagtgaagcggaggcgaaccgagcactgcagaggggtggcaatgtggaggtaatcaagaaggagcatttccgctccaacgtgcagaaaggaggaccaggtgcaaacgcaaaacggttggatgaggataccgagacactgaaggtgaagcgtgtggacaatggacttcgcctagcaatccagaaggcacgccaagcgaaaggatggacccaacagatgctcgcacaacaaatcgctgagcgagtgggtgtggtgactgagtacgaaaacggtaaggctgtgcctgaggagcgcgtccttgtgaagatggaacgggcgtttggaatccatctccgcggagtgaaggccggacaaccgtttggatccgcgaaaccccagccgaagaagtga

SEQ ID NO: 6704 - protein, 160 aa, Trypanosoma brucei
MARGQIMTGQDWEPQVFNIHNRKNTQQRPTRVSEAEANRALQRGGNVEVIKKEHFRSNVQKGGPGANAKRLDEDTETLKVKRVDNGLRLAIQKARQAKGWTQQMLAQQIAERVGVVTEYENGKAVPEERVLVKMERAFGIHLRGVKAGQPFGSAKPQPKK

SEQ ID NO: 6705 - DNA, 441 bp, Bombyx mori
  CDS (1)..(441)
atgtctgactgggatacagttacaattcttcgcaagaaaccaccaaaagcttctgctttaaaaactgaacaagctgtaaatgcagcgcggcgacaaggtattccggttgatacgcaacaaaaatatggggctggaactaataaacaacatgttactactaaaaatacagctaaactagacagagaaacagaagaattacgccatgaaaaaataccacttgatctggggaaacttataatgcaaggcagacaagctaaaggaatgagtcaaaaagacctcgccactaaaatttgtgaaaaaccacagattgtaaatgattatgaagctggtcgtggcattccaaataacattgttcttggaaaaattgaaagggcaattggaataaaacttcgtggaaaagaaagaggccaaccactgcagcctcctggcggacagaaataa

SEQ ID NO: 6706 - protein, 146 aa, Bombyx mori
MSDWDTVTILRKKPPKASALKTEQAVNAARRQGIPVDTQQKYGAGTNKQHVTTKNTAKLDRETEELRHEKIPLDLGKLIMQGRQAKGMSQKDLATKICEKPQIVNDYEAGRGIPNNIVLGKIERAIGIKLRGKERGQPLQPPGGQK

SEQ ID NO: 6707 - DNA, 429 bp, Ricinus communis
  CDS (1)..(429)
atggcaggagttggaccaatctcacaggactgggaaccagtagtcatccgcaaaaaggctcccaccgccgccgctaagaaggacgagaaggtcgtcaacgctgctcgtcgcgctggtgccgagatcgaaactctaaaaaaatctaatgctggtactaataaagcagcctctagcagcacttctttaaacacaaggaagcttgatgaagaaacagagaacctaactcatgaccgagtaccgactgaattgaagaaagccataatgcaggctcggatggaaaagaaatttacccaggctcagcttgctcagatgatcaatgaaaagccccagataatccaagagtatgaatctggaaaagcaattcccaatcaacagataataggcaaactggagagggcccttggtgtgaagctgcgaggaaagaaatga

SEQ ID NO: 6708 - protein, 142 aa, Ricinus communis
MAGVGPISQDWEPVVIRKKAPTAAAKKDEKVVNAARRAGAEIETLKKSNAGTNKAASSSTSLNTRKLDEETENLTHDRVPTELKKAIMQARMEKKFTQAQLAQMINEKPQIIQEYESGKAIPNQQIIGKLERALGVKLRGKK

SEQ ID NO: 6709 - DNA, 261 bp, Colletotrichum gloeosporioides
  CDS (1)..(261)
atgtccgacgacatcatcaagcccaacaccgtcggcaaggaggtcggcgacgccatctcccagacgcgccagaagatggagcccaagatgacccagaaggacctcgccaccaagtgcaacaccaccgagaccgtcgtcgccgagttcgagcgcggctccgctgccccggaccagaaggtcctcgccgcaatggagcgtgtcctcaacgtcaagctgaggggcaacgacatcggcgcccctcgtttcgccaagaagaaataa

SEQ ID NO: 6710 - protein, 86 aa, Colletotrichum gloeosporioides
MSDDIIKPNTVGKEVGDAISQTRQKMEPKMTQKDLATKCNTTETVVAEFERGSAAPDQKVLAAMERVLNVKLRGNDIGAPRFAKKK

SEQ ID NO: 6711 - DNA, 492 bp, Leishmania major
  CDS (1)..(492)
atgccgaggggagctattccaacgggccaggactgggaggagcagcgcttcaacttccagcagcgcggcagcggtggctcggcgcagcctcgcaaagtgacggagcgcgatgctaaccgtgcaatgcaaagcggtcaaaacgtgcaggtccagcggaaggaacatcagcgtttcaaccagcagaccgtcagcgcgggcgcgaacgcgaagaagctcgacgaggacaacgagacgctgaaggtgaagaaggtggacccgcacctccgcgtgcgtattatgaaggagcgccaggctctgaactggtcgcagcaggatctcgcccagcgcatttctgagcgtgtgtctgtagtggccgagtacgagagcggtaaggcggtccaggaagagcgagttattgtgaagatggagaaggcgctcggcgtgcacttgcgtggcgccaaggctggcgagccgatgggcaagactcgtcctgctccgaaggctcaggagtag

SEQ ID NO: 6712 - protein, 163 aa, Leishmania major
MPRGAIPTGQDWEEQRFNFQQRGSGGSAQPRKVTERDANRAMQSGQNVQVQRKEHQRFNQQTVSAGANAKKLDEDNETLKVKKVDPHLRVRIMKERQALNWSQQDLAQRISERVSVVAEYESGKAVQEERVIVKMEKALGVHLRGAKAGEPMGKTRPAPKAQE

SEQ ID NO: 6713 - DNA, 447 bp, Tetraodon nigroviridis
  CDS (1)..(447)
atggcagaaagtgactgggataccgtgactgttttgaggaagaaggggccgacggcagcccaggccaaatccaagcaggcgatcactggtgctcagagacgaggggaagatattgagacaaccaagaaatggtctgctgggcagaacaaacagcacctggtgacgaagaacacagccaaactggaccgggaaaccgaggagttgcaccacgacagagtgaccctggaggtgggcaaggtcatccagaaaggccggcaggacaaaggcctgacccagaaggacctggccaccaaaattaacgagaagccccaagtcatcgcagactacgagtgtggaaaagcaattcctaacaaccagatcatgggcaagatagagagagccattggcttgaaactgcgtgggaaggatattggcgaacccctggaggcaaaacccaagacgaaatga

SEQ ID NO: 6714 - protein, 148 aa, Tetraodon nigroviridis
MAESDWDTVTVLRKKGPTAAQAKSKQAITGAQRRGEDIETTKKWSAGQNKQHLVTKNTAKLDRETEELHHDRVTLEVGKVIQKGRQDKGLTQKDLATKINEKPQVIADYECGKAIPNNQIMGKIERAIGLKLRGKDIGEPLEAKPKTK

SEQ ID NO: 6715 - DNA, 438 bp, Theileria annulata
  CDS (1)..(438)
atgtcataccaagattggaagcctgtagtttggactaaacatgagaatttcaagggtcctaacaaagaatccgcacttaacaaggccagacgtgctggagtagagcttgatactcaaaagaaatttcttggaggtcaaaacaagacaactaaatcatttttaccccctaatgctgcaaagattgagaatgaaaatgaatcatttcacatcgagcgggtttcatttgcctttcgtaccgctttacaaaaggccagaatggccaaaaatatgactcaaattcagctagctcgagcaataaatgaaaatgaaactttgataaaggaatacgaaaatggaagtggaataccaaatggtcaagtaatccaaaagttgaaccgagttctaggtgtaaaattacccccttcaagagaatccaaatcgaaatctcttgaattatga

SEQ ID NO: 6716 - protein, 145 aa, Theileria annulata
MSYQDWKPVVWTKHENFKGPNKESALNKARRAGVELDTQKKFLGGQNKTTKSFLPPNAAKIENENESFHIERVSFAFRTALQKARMAKNMTQIQLARAINENETLIKEYENGSGIPNGQVIQKLNRVLGVKLPPSRESKSKSLEL

SEQ ID NO: 6717 - DNA, 477 bp, Caenorhabditis briggsae
  CDS (1)..(477)
atgtccaagtacggttgcccaacttctgactgcgacccaaacgttgtgactatgatcacgaagcgtggacctgtcaacaagacattgaagtccgcctcacagctgaatgctgctcaacgttctggagctgaaatttcgacagagaaaaagacgatgtccggtggaaaccgtcaacataccgcaaacaagaacactctccgactggatgaagaaacggaagaacttcatcacgagaaagtcgcgttatctcttggaaaagtgatgcagcaggctcgcgcaaccaaaggttggacccagaaagatttgtcaacgcaaatcaacgaaaagccgcaagtcgtcggcgaatacgaaagcggaaaagcggtcccgaaccaacaaatcctagccaaaatggaaagagctctcggcgtcaaattgcgtggaaaggatatcggaaaaccatttggggcgaagccagccgcggctgctaagaagtga

SEQ ID NO: 6718 - protein, 158 aa, Caenorhabditis briggsae
MSKYGCPTSDCDPNVVTMITKRGPVNKTLKSASQLNAAQRSGAEISTEKKTMSGGNRQHTANKNTLRLDEETEELHHEKVALSLGKVMQQARATKGWTQKDLSTQINEKPQVVGEYESGKAVPNQQILAKMERALGVKLRGKDIGKPFGAKPAAAAKK

SEQ ID NO: 6719 - DNA, 468 bp, Oryza sativa
  CDS (1)..(468)
atgccgacggggaggttgagcggcaacatcacgcaggactgggagccggtggtgctgcggcggacgaagccgaaggcggcggaccttaagtcgacgagggcggtgaaccaggcgatgcggacgggggcgccggtggagacggtgcggaaggcggcagcgggcacgaacaaggcggcggcgggggcggcggcgcccgcgcggaagctggacgagtcgacggagccggcggggctggggcgcgtgggcgcggaggtgcgcggcgcgatccagaaggcccgggtggcgaaggggtggagccaggcggagctcgccaagcgcatcaacgagcgggcgcaggtggtgcaggagtacgagagcggcaaggccgtccccgtccaggccgtgctcgccaagatggagcgcgcgctcgaggtcaagctccgcggcaaggcggtcggcgcgccggccgcgcccgccggcgccaagtga

SEQ ID NO: 6720 - protein, 155 aa, Oryza sativa
MPTGRLSGNITQDWEPVVLRRTKPKAADLKSTRAVNQAMRTGAPVETVRKAAAGTNKAAAGAAAPARKLDESTEPAGLGRVGAEVRGAIQKARVAKGWSQAELAKRINERAQVVQEYESGKAVPVQAVLAKMERALEVKLRGKAVGAPAAPAGAK

SEQ ID NO: 6721 - DNA, 435 bp, Oikopleura dioica
  CDS (1)..(435)
atggatgactgggattccgttactgttatcagcaaatcccgacctgctcgaggaactgcaaatgaaaaaagcgcccttcgacaagcccagcgatctggcaatcttgaaactcgtcaaaaaatgtttgccggaaccaatgcaaaaggaaataccgctcatcatgccaaactcgaccgggaaactgaagagctaaagcacaaaactcttggaatggatgtcggaaagcttattcaaaagggtcgaaaccagaagggaatgacccaaaaagaactcgcaactaaaatctgcgagaaaccccagatcatcaacgagtacgagcttgggaagtcgattccaaataatcaagtcttgggcaagattgaacgtgctatcggcataaaactccgcggtaaggacaagggacagcctattgccgcgccaaagcctaaaaagtaa

SEQ ID NO: 6722 - protein, 144 aa, Oikopleura dioica
MDDWDSVTVISKSRPARGTANEKSALRQAQRSGNLETRQKMFAGTNAKGNTAHHAKLDRETEELKHKTLGMDVGKLIQKGRNQKGMTQKELATKICEKPQIINEYELGKSIPNNQVLGKIERAIGIKLRGKDKGQPIAAPKPKK

SEQ ID NO: 6723 - DNA, 438 bp, Drosophila yakuba
  CDS (1)..(438)
atgtcggactgggactctgtaactgttctgcggaagaaggcacccaaatcgtcgaccctaaagacggaatcggcggtcaaccaggcgcgccgccagggagtcgccgtggatacccaacagaagtatggtgctggcaccaacaagcagcatgtgaccaccaagaacactgccaaactggaccgcgagaccgaggagctgcgccacgacaagatccccctcgatgtgggcaagctcatccagcagggacgccagggcaagggcctcagccaaaaggacctggcaactaaaatttgcgaaaagcagcaagtggtaaccgactacgaggccggtcgcggaattccaaacaacttgattctgggaaaaatggaacgcgttctgggcataaagctgcgcggcaaggagcgcggccaaccaatagcgcctcccggtaagaagtag

SEQ ID NO: 6724 - protein, 145 aa, Drosophila yakuba
MSDWDSVTVLRKKAPKSSTLKTESAVNQARRQGVAVDTQQKYGAGTNKQHVTTKNTAKLDRETEELRHDKIPLDVGKLIQQGRQGKGLSQKDLATKICEKQQVVTDYEAGRGIPNNLILGKMERVLGIKLRGKERGQPIAPPGKK

SEQ ID NO: 6725 - DNA, 411 bp, Plasmodium yoelii yoelii
  CDS (1)..(411)
atgcaacaccaagatattaagccagttatttggaacaaaaatgacagaaaacccaaacccaaaaatatcgaagaggctcgtaaattaggcatggatgttgaaattgaaaaaaaatttttaggaggtaaaaataaatcatgtaaaggaaatttaatcatagaaaataaagctaaaattgaacaagaaacagaaaattttaaaatcgatagagttacacctgctttttcaagagctttacaacaagctcgaatgaacaaaaaattaacgcaagtacaattagcaagacttgttaatgaacctgaaagtgttattaaagaatatgaaaatggtaaagcaatacctaataatatgattattcaaaagctaaatagagtattaggtgttaatttgccatctccaaaaaaaaaataa

SEQ ID NO: 6726 - protein, 136 aa, Plasmodium yoelii yoelii
MQHQDIKPVIWNKNDRKPKPKNIEEARKLGMDVEIEKKFLGGKNKSCKGNLIIENKAKIEQETENFKIDRVTPAFSRALQQARMNKKLTQVQLARLVNEPESVIKEYENGKAIPNNMIIQKLNRVLGVNLPSPKKK

SEQ ID NO: 6727 - DNA, 405 bp, Schistosoma japonicum
  CDS (1)..(405)
atggagggtgtccgtacagtgactcttaaatcaaattcatcttttagtgcggcgcaacgccgcggtgatcacatagaaactcacaaacgatgggctgctggtcaaaacaaacagcggaccatcgagaaaaacacagctaagctggaagaagatacagaggatctgcacaatgatctggttgacatggatgttggtaagattataatgcaggcaaggcaggaaaagaacttaacacaaaaggatttggccactaaaataacgaaaagcaacaaagtgattgcagactatgaacaaggtcgtgcagtgaaaaaccaagctattatttcgaagctggaaaaagcattaggtgtcaagttgcgaggtaaagataaaggaaaacctttgggaagtacgaagaaaacttag

SEQ ID NO: 6728 - protein, 134 aa, Schistosoma japonicum
MEGVRTVTLKSNSSFSAAQRRGDHIETHKRWAAGQNKQRTIEKNTAKLEEDTEDLHNDLVDMDVGKIIMQARQEKNLTQKDLATKITKSNKVIADYEQGRAVKNQAIISKLEKALGVKLRGKDKGKPLGSTKKT

SEQ ID NO: 6729 - DNA, 447 bp, Arabidopsis thaliana
  CDS (1)..(447)
atgccgagcagatacccagaagcagtaacacaagactgggaaccagtagttctccacaaatcaaaacaaaagagccaagacctacgcgatccgaaagcggttaacgcagctctgagaaacggtgtcgcggttcaaacggttaagaaattcgatgccggttcgaacaaaaaggggaaatctacggcggttccggtgattaacacgaagaagctggaagaagaaacagagcctgcggcgatggatcgtgtgaaagcagaggtgaggttgatgatacagaaagcgagattggagaagaagatgtcacaagcggatttggcgaaacagatcaatgagaggactcaggtagttcaggaatatgagaatggtaaagctgttcctaatcaggctgtgcttgcgaagatggagaaggttctaggtgttaaacttaggggtaaaattgggaaatga

SEQ ID NO: 6730 - protein, 148 aa, Arabidopsis thaliana
MPSRYPEAVTQDWEPVVLHKSKQKSQDLRDPKAVNAALRNGVAVQTVKKFDAGSNKKGKSTAVPVINTKKLEEETEPAAMDRVKAEVRLMIQKARLEKKMSQADLAKQINERTQVVQEYENGKAVPNQAVLAKMEKVLGVKLRGKIGK

SEQ ID NO: 6731 - DNA, 438 bp, Retama raetam
  CDS (1)..(438)
atgccaactcgagcaacaggaaccattacccaagactgggaaacagtagtcctccacaaatcaaagcccaaggcgcaggaccttcgcaacccgaaagccataagccaagccctccgagccggcgcagaggtccaaacaatcaaaaaattcgacgccggttcaaacgagaaaaccgccggtccggtcgtctatgcgaggaagctggatgaagcggctgaaccggcagcgttggagagagttgcgggcgaggtgaggcacgcgatacagaaggcgcgtttggaaaagaagatgagtcaggctgaggtggcaaaacagattaatgaaaggcctcaggtggttcaggaatatgagaatgggaaagcggttccgaaccaggccgtgttggctaagatggagagggtgcttggtgttaagcttaggggcaaaattggtaaatga

SEQ ID NO: 6732 - protein, 145 aa, Retama raetam
MPTRATGTITQDWETVVLHKSKPKAQDLRNPKAISQALRAGAEVQTIKKFDAGSNEKTAGPVVYARKLDEAAEPAALERVAGEVRHAIQKARLEKKMSQAEVAKQINERPQVVQEYENGKAVPNQAVLAKMERVLGVKLRGKIGK

SEQ ID NO: 6733 - DNA, 423 bp, Nicotiana tabacum
  CDS (1)..(423)
atgagtggaggaatagcacaagactgggagccggtggtgatccgcaagaaggcgcctaccgccgctgcacgcaaggatgagaaagccgtcaacgccgcccgtcgctccggtgctgagatcgaaaccatccgaaaatctgctgctggcacaaacaaagctgcctccagtagtacgaccttgaacaccaggaaacttgatgaagatactgagaatttggctcatcaaaaggtaccaactgaactgaagaaagccatcatgcaagctcgacaagataagaagctgacccaggctcaacttgcccagttgataaatgagaagcctcaaatcatccaggagtatgagtctggaaaggcgattccaaatcaacagataatctctaaactggagagagctcttggtgcgaaacttagaggaaagaaatga

SEQ ID NO: 6734 - protein, 140 aa, Nicotiana tabacum
MSGGIAQDWEPVVIRKKAPTAAARKDEKAVNAARRSGAEIETIRKSAAGTNKAASSSTTLNTRKLDEDTENLAHQKVPTELKKAIMQARQDKKLTQAQLAQLINEKPQIIQEYESGKAIPNQQIISKLERALGAKLRGKK

SEQ ID NO: 6735 - DNA, 444 bp, Anopheles gambiae
  CDS (1)..(444)
atgtcggaaagcgactgggacacagtgaccgtattgcgtaaaaaggctccaaaagcggccacactaaagactgaatcggccatcaataaggcacgccgtcaaggaattccagtggagaccacacagaaattcaacgctggaaccaacaaacagcatgttgcggctaaaaatacagccaaactggatcgcgaaacggacgaactgcgtcacaaaacgcttgcaccatccgttgcgaagctaatcatgcagggccgtcaggcgaagggactgagccagaaggatctcgctacgcaaatttgtgaaaagccacaaatcgttaacgactacgaggcgggccgtggcgttccaaacaacttgatcttgggcaaaatcgagcgcatcatcggcattaagctgcgcggtaaggatatcggcacacccatgctgcctcccggtaagaagtga

SEQ ID NO: 6736 - protein, 147 aa, Anopheles gambiae
MSESDWDTVTVLRKKAPKAATLKTESAINKARRQGIPVETTQKFNAGTNKQHVAAKNTAKLDRETDELRHKTLAPSVAKLIMQGRQAKGLSQKDLATQICEKPQIVNDYEAGRGVPNNLILGKIERIIGIKLRGKDIGTPMLPPGKK

SEQ ID NO: 6737 - DNA, 444 bp, Cryptosporidium parvum
  CDS (1)..(444)
atgagtcaggattggaatcaagtggtatggaaaaaaggtggttctagaccaaaaggaatatcaaaagaacaagatcttaatcaagcaagaagaaaaggtgaagaaatcattaccgagaaaaaatttcttggaggtagaaatgcatcaactaaacaaaatatccctcaaaatgctgccaaattagacgaagatactggtgactatcgtatcttcagagtttctggggaattttctagagctttacaacaagctagagttgcaaaaaagctcactcaggctcaacttgcacaaatgattaacgaaaaagctagtgttgttaatgattatgaatctggaaaggctattccaaaccctatattggttcaaaagatgtccagatgtttgggagtcaatttaccaaagcccgccccaaagaaaaagcctgataataataataatgattaa

SEQ ID NO: 6738 - protein, 147 aa, Cryptosporidium parvum
MSQDWNQVVWKKGGSRPKGISKEQDLNQARRKGEEIITEKKFLGGRNASTKQNIPQNAAKLDEDTGDYRIFRVSGEFSRALQQARVAKKLTQAQLAQMINEKASVVNDYESGKAIPNPILVQKMSRCLGVNLPKPAPKKKPDNNNND

SEQ ID NO: 6739 - DNA, 420 bp, Solanum tuberosum
  CDS (1)..(420)
atgagtggaatatcgcaagactgggagccggtagtaatcaggaagaaggcgcctacctccgccgctcgcaaggatgagaaagccgttaacgccgcccgtcgctccggcgccgagatcgaaaccgttaagaagtctaatgcaggctcaaacagggctgcctctagtagtacatcattgaacactaggaaacttgatgaagacactgagaatttgtctcatgaaaaggtaccaactgaactgaagaaagctatcatgcaagcacgacaagacaagaagctgactcagtctcaacttgctcaattgataaatgagaagccacagattatccaagaatacgagtcgggaaaggcaattccaaaccaacagataatctcaaaactggagagagctcttggagcgaaacttcgaggaaagaaataa

SEQ ID NO: 6740 - protein, 139 aa, Solanum tuberosum
MSGISQDWEPVVIRKKAPTSAARKDEKAVNAARRSGAEIETVKKSNAGSNRAASSSTSLNTRKLDEDTENLSHEKVPTELKKAIMQARQDKKLTQSQLAQLINEKPQIIQEYESGKAIPNQQIISKLERALGAKLRGKK

SEQ ID NO: 6741 - DNA, 441 bp, Lycopersicon esculentum
  CDS (1)..(441)
atgccgatgcgaccaacagggggattgaaacaagattgggatccaatcgtgctgcagaagccaaagatgaaggcccaagacctgaaggatccaaaaattgtgaatcaggcattgcgagctggagcacaagttcaaacggtgaagaaaatcgacgctggtttgaataagaaggcggcgacgttggcagttaatgtaagaaagctagatgaggcggcggaaccagcggcacttgagaaattgccggtggatgtaaggcaagcaatacagaaagcgcggattgagaagaagatgagccaagctgatctagcgaagaagatcaatgaaaggacgcaggttgttgccgagtatgagaatggtaaggcagtgcctaatcaactagtgttggggaaaatggagaacgttcttggtgttaaacttagaggtaaaattcacaagtcatga

SEQ ID NO: 6742 - protein, 146 aa, Lycopersicon esculentum
MPMRPTGGLKQDWDPIVLQKPKMKAQDLKDPKIVNQALRAGAQVQTVKKIDAGLNKKAATLAVNVRKLDEAAEPAALEKLPVDVRQAIQKARIEKKMSQADLAKKINERTQVVAEYENGKAVPNQLVLGKMENVLGVKLRGKIHKS

SEQ ID NO: 6743 - DNA, 441 bp, Brachydanio rerio
  CDS (1)..(441)
atggcagaatgcgactgggacacggtgaccgttttgaggaagaagggatcggccgcgcagtccaagtcgaagcaggctgtgactgctgctcagagaaagggagaagctgtggaaacatctaagaaatgggctgctgggcaaaataaacaacatgttgtaaccaaaaacacagccaagctggacagagagacggaggagctcagccaccagagagtgccacttgaagtgggcaaagtgatccagcagggccggcagaataagggcctcacccagaaagatctggctactaaaattaacgagaagccacagatcattgcggagtatgaatgtgggaaggctatccccaataatcaggtcatggggaaaatcgagcgagccattggccttaagttgcgtgggaaagacattgggctgcccctcgaagcctgttccaagaaatga

SEQ ID NO: 6744 - protein, 146 aa, Brachydanio rerio
MAECDWDTVTVLRKKGSAAQSKSKQAVTAAQRKGEAVETSKKWAAGQNKQHVVTKNTAKLDRETEELSHQRVPLEVGKVIQQGRQNKGLTQKDLATKINEKPQIIAEYECGKAIPNNQVMGKIERAIGLKLRGKDIGLPLEACSKK

SEQ ID NO: 6745 - DNA, 447 bp, Gallus gallus
  CDS (1)..(447)
atggcggagagcgactgggacacggtgacggtgctgcgcaagaagggccccagcgcggcccaggccaagtccaagcaggcggtgctggcagcgcagcggcggggtgaggacgtggagacctccaagaagtgggcagcaggccaaaacaaacaacacttcatcacaaagaacacagccaagctcgaccgagagacagaagagctgcaccatgacagagttcccctggaggtgggcaaagtaatccagcagggtcggcagagcaagggcatgacacagaaggacttggccacaaaaatcaatgaaaaaccacaagtcattgctgactacgaatcaggaagagcaatccccaacaaccaggttatgggcaagattgaaagagccattggccttaaactgcgtgggaaggatattggaaaaccactcgaaactggccccaaagggaaatga

SEQ ID NO: 6746 - protein, 148 aa, Gallus gallus
MAESDWDTVTVLRKKGPSAAQAKSKQAVLAAQRRGEDVETSKKWAAGQNKQHFITKNTAKLDRETEELHHDRVPLEVGKVIQQGRQSKGMTQKDLATKINEKPQVIADYESGRAIPNNQVMGKIERAIGLKLRGKDIGKPLETGPKGK

SEQ ID NO: 6747 - DNA, 447 bp, Homo sapiens
  CDS (1)..(447)
atggccgagagcgactgggacacggtgacggtgctgcgcaagaagggccctacggccgcccaggccaaatccaagcaggctatcttagcggcacagagacgaggagaagatgtggagacttccaagaaatgggctgctggccagaacaaacaacattctattaccaagaacacggccaagctggaccgggagacagaggagctgcaccatgacagggtgaccctggaggtgggcaaggtgatccagcaaggtcggcagagcaaggggcttacgcagaaggacctggccacgaaaatcaatgagaagccacaggtgatcgcggactatgagagcggacgggccatacccaataaccaggtgcttggcaaaatcgagcgggccattggcctcaagctccggggaaaggacattggaaagcccatcgagaaggggcctagggcgaaatag

SEQ ID NO: 6748 - protein, 148 aa, Homo sapiens
MAESDWDTVTVLRKKGPTAAQAKSKQAILAAQRRGEDVETSKKWAAGQNKQHSITKNTAKLDRETEELHHDRVTLEVGKVIQQGRQSKGLTQKDLATKINEKPQVIADYESGRAIPNNQVLGKIERAIGLKLRGKDIGKPIEKGPRAK

SEQ ID NO: 6749 - DNA, 447 bp, Mus musculus
  CDS (1)..(447)
atggccgagagtgactgggacaccgtgacggtgctgcgcaagaagggccccacggccgcacaggccaagtctaagcaggccatcttagcggctcagcgacgaggagaagatgtggagacatccaagaaatgggctgctggccagaacaagcagcattccattactaaaaacacagccaagctcgaccgggagaccgaggagctgcatcacgacagggtgaccctggaggtgggcaaagtgatccagcggggccggcagagcaaaggcctgacccagaaggacctggccacgaaaatcaatgagaagccgcaagtcatcgcagactatgaaagtggacgggccattccgaataaccaggttttgggcaaaattgagagagccatcggcctcaagctccgggggaaggacatcgggaagcctatcgagaaggggccgaaggcgaaatga

SEQ ID NO: 6750 - protein, 148 aa, Mus musculus
MAESDWDTVTVLRKKGPTAAQAKSKQAILAAQRRGEDVETSKKWAAGQNKQHSITKNTAKLDRETEELHHDRVTLEVGKVIQRGRQSKGLTQKDLATKINEKPQVIADYESGRAIPNNQVLGKIERAIGLKLRGKDIGKPIEKGPKAK

SEQ ID NO: 6751 - DNA, 444 bp, Xenopus laevis
  CDS (1)..(444)
atggcggagagcgattgggacacagtgaccgtgctcagaaagaagggccccaccgcggcgcaggccaagtccaagcaggctattacagctgctcagagacgaggggaagaggtagagacgtcgaaaaaatggtcagccggtcagaacaagcagcacacaatcacaaggaacacggccaagctggacagagagacggaggagctgcaccacgacagagtgccactagaagtgggcaaagtcattcagcagggccggcagggcaaaggaatgacccagaaggacttggccacgaaaattaatgaaaaaccccaagtgattgccgactatgaatgtggaaaggccattcccaacaaccaggtgatgggcaagattgaaagggtcataggcctgaagctgcgcgggaaggacattggaaaacccatggatcccggcccaaaaaaatga

SEQ ID NO: 6752 - protein, 147 aa, Xenopus laevis
MAESDWDTVTVLRKKGPTAAQAKSKQAITAAQRRGEEVETSKKWSAGQNKQHTITRNTAKLDRETEELHHDRVPLEVGKVIQQGRQGKGMTQKDLATKINEKPQVIADYECGKAIPNNQVMGKIERVIGLKLRGKDIGKPMDPGPKK

SEQ ID NO: 6753 - DNA, 459 bp, Ashbya gossypii
  CDS (1)..(459)
atgtcatcggactgggacaccaacacggtcatcggccagcgcgtcagaaccggcggcagcgggcctcgccagcaggtcgcccgcacgcagggtcagatcaacgccgcgcgccgcgcgggcctcgtgctctctgtcgacaagaagtacgcgtcctccaacaccaaggccaacaacgagggccagcgcctcaccatggtcgaccgcgagaccgacatcgtgaagcccaagaagctcgacccctccgttggccgcgccattgccaagggccgtggcgacaagggcatgacccagaaggacctcgccacgcggatcaacgagaagcccaccgtcattaacgactacgaggccggccgcgccatccccaaccagcagatcctcgccaagatggagcgcgcgctgggggtgaagctgcggggcaagggcatcggcgagcccctcgggggccccaagaagaagtaa

SEQ ID NO: 6754 - protein, 152 aa, Ashbya gossypii
MSSDWDTNTVIGQRVRTGGSGPRQQVARTQGQINAARRAGLVLSVDKKYASSNTKANNEGQRLTMVDRETDIVKPKKLDPSVGRAIAKGRGDKGMTQKDLATRINEKPTVINDYEAGRAIPNQQILAKMERALGVKLRGKGIGEPLGGPKKK

SEQ ID NO: 6755 - DNA, 465 bp, Aspergillus fumigatus
  CDS (1)..(465)
atgagtgattgggattctgtcacacgcattggagccaagcaccgtgctggtgccgctccccgagagacggtagtcaggggaaagagcgctctgaacgctgctcagcgccagggtctcgtcattgctactgagaagaagtatgcaactggcaatgctgccggaaagacagccgccatggaaggtcagcacctgacaaaggtcgatcgaagcgacgacattgtcaagcccaagaccgtcggtctccaggtcgcagacgccatcaagaagcgccgaaacgaggagggctacaaaatgacacaaaaggaactcgctaccaagtgcaacaccaccatcacagtcatccaggactttgagaggggtacagccgcgcccgaccagaaggtcctgagcgctatggagcgtgtgctcaatatcaaactcagaggctcggacatcgggaaggagaagttccctaagaagaagtaa

SEQ ID NO: 6756 - protein, 154 aa, Aspergillus fumigatus
MSDWDSVTRIGAKHRAGAAPRETVVRGKSALNAAQRQGLVIATEKKYATGNAAGKTAAMEGQHLTKVDRSDDIVKPKTVGLQVADAIKKRRNEEGYKMTQKELATKCNTTITVIQDFERGTAAPDQKVLSAMERVLNIKLRGSDIGKEKFPKKK

SEQ ID NO: 6757 - DNA, 552 bp, Candida albicans
  CDS (97)..(552)
aaagaattggtggtggcaactgatcaaagaaaaaaaaatgacaccgttgactcacactttctttttctattcattaaatcaataatattatcgatcatgtcttcagattgggattcagttactattatcggacaaaaggccagagttggcggtggtggtccaagagaaaatgttgctaagacttcttcacaattaaatgctgccagaagagctggtttggttgttggtaccgaaaagaaatacggaactgccaacaccaagtcaaatccagaaggacaaagattaactaaattggatgcaactgatgatgttgttgctgttaagaaagtagatgtcagtgttggtaaagcgattcaacaagctagacaagaaaagaaattgactcaaaaagagttggccactaaggtgaatgaaaaaccaaacgttatcaatgattacgaagccggaagagctattccaaaccaacaattattggccaagttagaaagagccttgggtgttaagttaagaggtaagaatattggtgaacctttgtttgctaagaaaaaataa

SEQ ID NO: 6758 - protein, 151 aa, Candida albicans
MSSDWDSVTIIGQKARVGGGGPRENVAKTSSQLNAARRAGLVVGTEKKYGTANTKSNPEGQRLTKLDATDDVVAVKKVDVSVGKAIQQARQEKKLTQKELATKVNEKPNVINDYEAGRAIPNQQLLAKLERALGVKLRGKNIGEPLFAKKK

SEQ ID NO: 6759 - DNA, 456 bp, Candida glabrata
  CDS (1)..(456)
atgtctgattgggaatctcatactgttattggtcaaaaggctagagctggtggttctggtccaagagccaacgtcgctagaacacaagggcagatcaatgctgccagaagacaaggccttgtcctttctgtggataagaagtacggtactgccaacaccaagggtgacgccgaaggccagaggttgaccaaggttgaccgtgagaccgacattgtcaagccaaagaagctggatgccaatgttggtaagaccattgcccgtgttagaaccgaaaagaagatgtctcaaaaggacctggccaccaagatcaacgagaagccaacagttattaacgactacgaggccggcagagccatccctaaccaacaagtgctcggtaagatggaaagagctctcggtgtcaagctgagaggtaaagccattggtgagcctctaggtggcccaaagaagaaataa

SEQ ID NO: 6760 - protein, 151 aa, Candida glabrata
MSDWESHTVIGQKARAGGSGPRANVARTQGQINAARRQGLVLSVDKKYGTANTKGDAEGQRLTKVDRETDIVKPKKLDANVGKTIARVRTEKKMSQKDLATKINEKPTVINDYEAGRAIPNQQVLGKMERALGVKLRGKAIGEPLGGPKKK

SEQ ID NO: 6761 - DNA, 453 bp, Cryptococcus neoformans
  CDS (1)..(453)
atgtctgactgggataagcctacggtcatcggtttccgacagcagaagcctactgttgccaagggatctactttgaacgctgctcaacgagccggtcttgtcatttcctcggagtctaagggtgctggccagtcaaagggtcctgccgatcatcaacgtattgccaagcttgaccgagatgacgcccctaagcccccagagaaggtcagcgctgacgtcggtaaggccgttgctactgcgcgaatggcgatcaaaaacgcagagggcaagagtatgacccagaaggagcttgccacttcggtcaacgctaagcctcaagatattgctgatcttgagtctgggcgagctgtgcctgaccaagctcttttgggcaagctagagagaaagctcaatgtcaagctgcgtggagccaagaatctcattggtacacctctccatcccaaaaagaagtaa

SEQ ID NO: 6762 - protein, 150 aa, Cryptococcus neoformans
MSDWDKPTVIGFRQQKPTVAKGSTLNAAQRAGLVISSESKGAGQSKGPADHQRIAKLDRDDAPKPPEKVSADVGKAVATARMAIKNAEGKSMTQKELATSVNAKPQDIADLESGRAVPDQALLGKLERKLNVKLRGAKNLIGTPLHPKKK

SEQ ID NO: 6763 - DNA, 453 bp, Debaryomyces hansenii
  CDS (1)..(453)
atgtcagattgggattcagttactattattggacaaaaagccagaattggtggtggtggaccaagacaaaatgttgccaaaacccaagcggaattgaatgcagctagaagatcaggaaatgttgttggaacagaaaagaagtacggtagtactaacactaagtccaaccctgaaggacaaagattgaccaaattagatgcggttgacgacgttgtgcctaccaagaagttagatatgaatgttggtaaggccattcaacaagccagacaagagaagaaattgacacaaaaggacttggccaccaagatcaacgaaaagcctaatgttatcaacgactatgaagccggtagagccgttccaaaccaacaattgttgggtaagttggaaagagcgttgggggtcaagttgagaggtaagaacataggtgagccattatttgctaagaagaaataa

SEQ ID NO: 6764 - protein, 150 aa, Debaryomyces hansenii
MSDWDSVTIIGQKARIGGGGPRQNVAKTQAELNAARRSGNVVGTEKKYGSTNTKSNPEGQRLTKLDAVDDVVPTKKLDMNVGKAIQQARQEKKLTQKDLATKINEKPNVINDYEAGRAVPNQQLLGKLERALGVKLRGKNIGEPLFAKKK

SEQ ID NO: 6765 - DNA, 465 bp, Emericella nidulans
  CDS (1)..(465)
atgagcgactgggattctgttactcgcatcggctccaagaaccgtggtggccccgtcgttcgcgagaccgtcatcaagggtaagagcgcactcaacgctgcccagcgacaggggctcgttgtcggaactgaaaagaaatttgcgtctggaaattctgctggacgagccagcgccgttgaaggccaacatctcaccaaagtcgaccgcagcgacgacattgtaaagcccaagactgttgggctgcaagtagcagacgccatcaagaagcgccgaacggacgagggctacaagatgacacagaaggagctcgccaccaaatgcaacaccacagttaccgtcatccaagacttcgagcggggtacagccgcaccggaccagaaggtgcttagcgccatggagcgcgtgctgaacatcaagttgagaggctctgacatcgggaaagagaagttccccaagaaaaagtaa

SEQ ID NO: 6766 - protein, 154 aa, Emericella nidulans
MSDWDSVTRIGSKNRGGPVVRETVIKGKSALNAAQRQGLVVGTEKKFASGNSAGRASAVEGQHLTKVDRSDDIVKPKTVGLQVADAIKKRRTDEGYKMTQKELATKCNTTVTVIQDFERGTAAPDQKVLSAMERVLNIKLRGSDIGKEKFPKKK

SEQ ID NO: 6767 - DNA, 459 bp, Gibberella fujikuroi
  CDS (1)..(459)
  misc_feature (25)..(25): m is a or c
atggatgactgggataccaccacgmagattggtagccgcacccgtggctctggcgccgcccagcgagagactgttgttcgaggaaaggctgctctgaacgctgcccaacgagctggcggcctcactaccgagaagaagtactcttctgccaatgccggttccgcaccagagggtcagcgtatgacaaaggtcgatcgatccgacgacatcatcaagcccaacaccatcggcaagactgttggcgatgttatctccaaggctcgtcagcaagttgagcccaagatgacacagaaggatcttgctacccgatgcaacaccacccaggctatcgtcgccgacttcgagcgaggcactgccgcccccgatcagaaggtgcttggcgccatggagcgagtgctcaatgtcaagctgcgaggtagcgacattggcgctcccaagttccccaacaagaagaaatga

SEQ ID NO: 6768 - protein, 152 aa, Gibberella fujikuroi [sequence omitted]

SEQ ID NO: 6769 - DNA, 453 bp, Kluyveromyces lactis
  CDS (1)..(453)
atgtctgaatgggaacccagcacagtgattggccgtaaggttagaattggcggtggtggtcctcgccagcaggtggcaagaacacagggtcaaatcaacgaggctagaaggtctggtatggttctgtccgtcgataagaagtacggtactactaattctaagtcctccccagaaggccaacggttgaccaaagtggaccgtgaaaccgatattgtgaaaccaaaaaagatcgacgtcagcgttggtaaagctattcagaagggtagacaagacaagaacctaacacagaaggacttggctactaagattaacgagaagccaactatcgtcaacgattatgaatccggtaggggtattcctaaccagcagattttgggtaagatggagcgtgccttgggtatcaagttgcgtggtaagaacattggtgagcctttgggcggtccaaagaaatag

SEQ ID NO: 6770 - protein, 150 aa, Kluyveromyces lactis
MSEWEPSTVIGRKVRIGGGGPRQQVARTQGQINEARRSGMVLSVDKKYGTTNSKSSPEGQRLTKVDRETDIVKPKKIDVSVGKAIQKGRQDKNLTQKDLATKINEKPTIVNDYESGRGIPNQQILGKMERALGIKLRGKNIGEPLGGPKK

SEQ ID NO: 6771 - DNA, 483 bp, Neurospora crassa
  CDS (1)..(483)
atgtctgcctgggataccgacgctgtcaagatcggcaagaacgtcagccgtggtggtgctgggccccgcgagactgttgtccgcggcaagtctgctcttaacgctgctcagcgcagtgggaatatcatcgccaccgagaagaagtatgctgccggtaacactgcttccaagcccggtgttgagggccagcgcctaacaatggttgaccgctccgacgacatcgtcaagcccaagaccgtcagcaaagaggtcggtgccgccatccagaaggctcgcagcgccatcatgatcggcgacaaggccatgacccagaaggagcttgccactcgctgcaactctacccaggctatcattgcccagtatgagcgcggcgagggtgttcccgaccagaagctcctcggcaacctcgagcgtgtcctcaatgtcaagcttcgcggttccgacatcggcaagcccaagttcgagaagaaggagaagaagtga

SEQ ID NO: 6772 - protein, 160 aa, Neurospora crassa
MSAWDTDAVKIGKNVSRGGAGPRETVVRGKSALNAAQRSGNIIATEKKYAAGNTASKPGVEGQRLTMVDRSDDIVKPKTVSKEVGAAIQKARSAIMIGDKAMTQKELATRCNSTQAIIAQYERGEGVPDQKLLGNLERVLNVKLRGSDIGKPKFEKKEKK

SEQ ID NO: 6773 - DNA, 447 bp, Schizosaccharomyces pombe
  CDS (1)..(447)
atgtctgattgggataccgttactaaaattggcagccgtgctggaccaggagctagaactcatgttgctaagacacagtctcaaataaattctgctagacgtgctggcgccatcgtcggtacggagaaaaaatatgccacaggaaacaaaagtcaagatcctgctggtcaacacttaactaagattgatcgtgaaaatgaggttaaaccaccttccactactggccgttcagttgcacaagctatccaaaaaggacgtcaagcaaagggttgggctcaaaaggatttatctcaacggataaacgaaaagccacaagttgtaaatgactatgaaagtggtcgtgctattcccaatcagcaagttctttctaaaatggaacgtgctctaggtatcaaattacgtggccaaaacattggtgctcctttgggcggtcctaaaaagaagtaa

SEQ ID NO: 6774 - protein, 148 aa, Schizosaccharomyces pombe
MSDWDTVTKIGSRAGPGARTHVAKTQSQINSARRAGAIVGTEKKYATGNKSQDPAGQHLTKIDRENEVKPPSTTGRSVAQAIQKGRQAKGWAQKDLSQRINEKPQVVNDYESGRAIPNQQVLSKMERALGIKLRGQNIGAPLGGPKKK

SEQ ID NO: 6775 - DNA, 459 bp, Yarrowia lipolytica
  CDS (1)..(459)
atgtctgacgattgggaatccaaaactgttattggctctcgagcccgagttggcggaggaggtcctcgagccactgtcgctaagacccaggcagaaatcaacgctgccatgcgatccggtaacgttctgtctactgacaagaagtacgcttctgccaactccaaggacggaggagacggacagcgattgaccaagattgaccgatctgacgatatcattgcccctcctaaggttgaggcttctgttggtaaggccatcatcaagggccgatccgaaaagggtctgacccagaaggagcttgccgtcaagatcaacgagaagccccaggtggtcaacgactacgagtctggacgagcccagcccaaccagcaggttctcagcaagatggagcgagtccttggtatcaagcttcgaggtaaggacattggtcttcctcttggccccaagggaaagaaatag

SEQ ID NO: 6776 - protein, 152 aa, Yarrowia lipolytica
MSDDWESKTVIGSRARVGGGGPRATVAKTQAEINAAMRSGNVLSTDKKYASANSKDGGDGQRLTKIDRSDDIIAPPKVEASVGKAIIKGRSEKGLTQKELAVKINEKPQVVNDYESGRAQPNQQVLSKMERVLGIKLRGKDIGLPLGPKGKK

SEQ ID NO: 6777 - DNA, 315 bp, Dictyostelium discoideum
  CDS (1)..(315)
atggacgttcaaactaaatacggagctggtcaaaataaagtattaggtggtgccaatcaaaaaaagattgctgaatctgaagaagatattgctctcccagaattaaatccatcagtaccacaagcaattcaaagagccagaaatgctttgaaaatgacacaaaaagaattagcatttaaaattaatgaaagaccaggtgtaatcaatgaatatgaaagtggttctgccatcccaagtcaagctgttctttcaaaattagagaaggctttgaatgttaaattaagaggaaaagaaattggcaaaccactcaaataa

SEQ ID NO: 6778 - protein, 104 aa, Dictyostelium discoideum
MDVQTKYGAGQNKVLGGANQKKIAESEEDIALPELNPSVPQAIQRARNALKMTQKELAFKINERPGVINEYESGSAIPSQAVLSKLEKALNVKLRGKEIGKPLK

SEQ ID NO: 6779 - DNA, 24 bp, Artificial sequence
  primer
atgtcgcagaaggatttggcaacc

SEQ ID NO: 6780 - DNA, 25 bp, Artificial sequence
  primer
tcatttcttctttggagctcccaaa

SEQ ID NO: 6781 - protein, 150 aa, Artificial sequence
  consensus sequence
  Variant (3)..(19): Xaa in position 3 to 19 is any amino acid
  Variant (20)..(36): Xaa in position 20 to 36 is any or no amino acid
  Variant (38)..(38): Xaa in position 38 is any amino acid
  Variant (40)..(40): Xaa in position 40 is any amino acid
  Variant (42)..(46): Xaa in position 42 to 46 is any amino acid
  Variant (47)..(48): Xaa in position 47 to 48 is any or no amino acid
  Variant (50)..(64): Xaa in position 50 to 64 is any amino acid
  Variant (65)..(69): Xaa in position 65 to 69 is any or no amino acid
  Variant (71)..(71): Xaa in position 71 is any amino acid
  Variant (73)..(90): Xaa in position 73 to 90 is any amino acid
  Variant (92)..(94): Xaa in position 92 to 94 is any amino acid
  Variant (96)..(97): Xaa in position 96 to 97 is any amino acid
  Variant (99)..(100): Xaa in position 99 to 100 is any amino acid
  Variant (101)..(107): Xaa in position 101 to 107 is any or no amino acid
  Variant (109)..(110): Xaa in position 109 to 110 is any amino acid
  Variant (113)..(114): Xaa in position 113 to 114 is any amino acid
  Variant (118)..(124): Xaa in position 118 to 124 is any amino acid
  Variant (127)..(127): Xaa in position 127 is any amino acid
  Variant (129)..(129): Xaa in position 129 is any amino acid
  Variant (131)..(131): Xaa in position 131 is any amino acid
  Variant (133)..(138): Xaa in position 133 to 138 is any amino acid
  Variant (140)..(140): Xaa in position 140 is any amino acid
  Variant (143)..(144): Xaa in position 143 to 144 is any amino acid
  Variant (146)..(146): Xaa in position 146 is any amino acid
DWXXXXXXXXXXXXXXXXXXXXXXXXXXXXXXXXXXAXRXGXXXXXXXKXXXXXXXXXXXXXXXXXXXXKXDXXXXXXXXXXXXXXXXXXIXXXRXXKXXXXXXXXXQXXLAXXINEXXXXXXXYEXGXAXPXXXXXXKXERXXGXKLRG

SEQ ID NO: 6782 - DNA, 1704 bp, Saccharomyces cerevisiae
  CDS (1)..(1704)
atgactggcgacggtagtgcacatatttctaaaaacaatcaaaatcaacacaaagatcgcttcaagtttattgtgaatgataaaagtattctaggacctcaatggttaagcctttaccaaacggatgggaaagtaacattcgcaaagtcccacttcgagcaagcaatgatgaacgttattagagaaccaaatattaactctactgtcatattaagagcggatattttgaaagagatcaatcatgctgcagaagctgggtctgagccaaaatttgacgagtccgtattaaaaaagtttgagatcgataatggtaatgaaagcggtgaagaagatgtcaagaagataaatattgaagatttaaacataaggtcgtgtgaaacatctgagagtttaaaattgtcacccgttcatgaatttgtaagaaggatcattcctaggaatttttacaaagatgctatcataaaccaaacatgtttaatcctaaatagcaaagaccctaattttcaggagacctcattgattgtatatacgccgcacattaactctgagaaagactgtccgttttatattccaagaacgcaaagtgtaggcattttgttacaccagtcagttctttctgtacactacattcccttccccgaggataaaactgcctttacagatgaatctgagcgtgttgtaagaaccgcttataggttattacaaactgctaacaaacactcaaagggtgtgatgcagggttatgaaaagagggtcaatcacgatcaagtggtaaataaagtcaattttcagaacacatacattgttttgaagaaaaaatactccaagttcctggtggagaattgggcagagtctacagacccaaaaaaacatgtttttgaagacatagccattgccgctttcctgattgaattatggattaaagtgtacggtccagacttccgttcaaaaatgcaatttagagatttgggatgcggcaatggtgctctttgttatattttactgagtgaaagtattaaaggtctcggcatagatgcaaggaagcgcaaatcgtggtctatctacccgcctgaagtgcaatcatcgttaaaggagcaagttataataccttctatccttttaagaccccatcctgctttgaaaagacaagtacctcatttggaacacaatgggagatttttcccagtcaaggtgacgcacgaagtgattgcccccgcaaccgtcgtgtattcaagtgaggacttactaaaatctccgcaggtcaatacagcagagttcccaccagatacttttattataggtaaccactcagatgagttgacttgctggatcccattactaggtcatccttatatggttataccttgttgctctcataatttttctggccagagagttcgttttaacgtaaggaaacgttcgcctaggtcaaatgaaatcaaaaaccagaataacagtaagagcacctactctggtttggttgatcacgttgaatatatttcatctcgtgtaggctggaaagtagagaaagagatgttaaggataccaagcacaagaaatgcagccatcataggtgtagaaaatgcaaccttaaagcattttccaacgcaagcagtgtacgatatgatttgggaagacggtggagctgaagggtggattcagaacacaatgtccttattgaaaagaaacccaagaaaccattaa

SEQ ID NO: 6783 - protein, 567 aa, Saccharomyces cerevisiae
MTGDGSAHISKNNQNQHKDRFKFIVNDKSILGPQWLSLYQTDGKVTFAKSHFEQAMMNVIREPNINSTVILRADILKEINHAAEAGSEPKFDESVLKKFEIDNGNESGEEDVKKINIEDLNIRSCETSESLKLSPVHEFVRRIIPRNFYKDAIINQTCLILNSKDPNFQETSLIVYTPHINSEKDCPFYIPRTQSVGILLHQSVLSVHYIPFPEDKTAFTDESERVVRTAYRLLQTANKHSKGVMQGYEKRVNHDQVVNKVNFQNTYIVLKKKYSKFLVENWAESTDPKKHVFEDIAIAAFLIELWIKVYGPDFRSKMQFRDLGCGNGALCYILLSESIKGLGIDARKRKSWSIYPPEVQSSLKEQVIIPSILLRPHPALKRQVPHLEHNGRFFPVKVTHEVIAPATVVYSSEDLLKSPQVNTAEFPPDTFIIGNHSDELTCWIPLLGHPYMVIPCCSHNFSGQRVRFNVRKRSPRSNEIKNQNNSKSTYSGLVDHVEYISSRVGWKVEKEMLRIPSTRNAAIIGVENATLKHFPTQAVYDMIWEDGGAEGWIQNTMSLLKRNPRNH

SEQ ID NO: 6784 - DNA, 1023 bp, Danio rerio
  CDS (1)..(1023)
atgacagataagcgcagcacagagaacttttggtccgctgctgatgtctggatcaataaaccacacgttgtaaacaagagactgtctggcgtaacagagacgaagtacagggatgtagacacttcaggtttaaatcaggtattatctactcttctggggagcagtattgagatcagccatatttgtcagtttcttcgcgtcgataatgcgaataaggagcttgatactgcaggacgttggtgtgttggagtcagaaccattattcccaaagtgaccaaaacagcagagtgtaacgttatgtataaagacgttattgttaaagatattgttggacatgcagtgacatttatcccatttgaagagattgctggacatgttactctcaagagcagtaatatttatcaaatcgacctgaagcctgatgaagggatgttttcccttcacgtgctgagacctgagcaatggtacagtgatggaatagcttatcctaaactgtcttggcttcgtactgaacttctacctaaactgtcccggtggtctctagagagcaaaacctgtgtgtttaagagtaccctgtctctcataccggtggacaaatacagtatgctctaccagcagctgaaactgaaatataaagatttagtaaaggtctggccagaagttaccgatccacagaagtttgtgtttgaagatgtggctattgctacgtatctgttggtcttgtgggcggaagagcgtgctgaaaagggaacaactaccaaacagtccttcgtggatcttggctgtggaaatggcctcctggttcacatattaaacaatgaagggcatcctggaaagggcattgacattcgcaaaaggaagatctgggatttgtatgggcctggtacacatctagaggaaaatgccatcacacctagcaatggctttctttttcccaccacagactggctgattggaaaccactcagatgagctcacaccatggatacctgttatagcagctaggcaagtcaagtatttataa

SEQ ID NO: 6785 - protein, 340 aa, Danio rerio
MTDKRSTENFWSAADVWINKPHVVNKRLSGVTETKYRDVDTSGLNQVLSTLLGSSIEISHICQFLRVDNANKELDTAGRWCVGVRTIIPKVTKTAECNVMYKDVIVKDIVGHAVTFIPFEEIAGHVTLKSSNIYQIDLKPDEGMFSLHVLRPEQWYSDGIAYPKLSWLRTELLPKLSRWSLESKTCVFKSTLSLIPVDKYSMLYQQLKLKYKDLVKVWPEVTDPQKFVFEDVAIATYLLVLWAEERAEKGTTTKQSFVDLGCGNGLLVHILNNEGHPGKGIDIRKRKIWDLYGPGTHLEENAITPSNGFLFPTTDWLIGNHSDELTPWIPVIAARQVKYL

SEQ ID NO: 6786 - DNA, 1236 bp, Homo sapiens
  CDS (1)..(1236)
atgtgtatcaaattcagctcagtcatagcaaagaagaatgaaagatggcattcagatggaatcgtgtatcccaaacccacgtggcttggagaagagttgctggccaagttggccaagtggtctgtagagaacaagaagagtgactttaaaagcaccctttccctcatctccattatgaagtatagcaaggcttaccaggaacttaaagagaagtataaggaaatggttaaggtgtggcctgaagtcactgatcctgagaagttcgtgtatgaagatgtggctatcgcagcatacctgctgattctatgggaagaagaaagggctgagaggagactaactgccaggcagtcctttgtggacctgggatgtggaaatggcctcctggtccacatcctgagcagtgaggggcatccaggcagagggattgatgtccgaagaagaaaaatctgggacatgtatggaccacaaactcagttagaggaagatgcaatcacacccaatgataagacccttttccctgatgttgattggttaatcggtaaccattctgatgaactcacaccatggatacctgtcattgcagccaggtcttcctacaattgccgcttctttgtcctcccctgctgcttctttgacttcattggaagatactcccggaggcagagtaagaagactcagtaccgggaataccttgacttcattaaagaagtgggcttcacctgtgggtttcacgtggacgaagactgcctcaggattccttcaaccaaaagagtctgtctcgttggaaaatccagaacatacccttcctccagagaagcttccgtggatgaaaagaggactcagtacattaagagcaggcggggctgccctgtaagcccacctggctgggagctttccccttctccacgctgggttgctgctggcagtgctggtcactgtgacggtcagcaagctctggacgccagggtcgggtgtgtaaccagggcctgggccgctgagcatggagcagggccccaggctgaaggaccctggctacctggatttcatcccagagaaaaggctgagcgtgtgaggaactgtgccgccctgccacgagattttattgaccaagtggttttgcaagtagcgaatttactgttaggtggaaagcaattaaacacaagaagttctcgaaatgggagtttgaagacctggaatgggggaggtaagctgtccaccatcttagggaggggctag

SEQ ID NO: 6787 - protein, 411 aa, Homo sapiens
MCIKFSSVIAKKNERWHSDGIVYPKPTWLGEELLAKLAKWSVENKKSDFKSTLSLISIMKYSKAYQELKEKYKEMVKVWPEVTDPEKFVYEDVAIAAYLLILWEEERAERRLTARQSFVDLGCGNGLLVHILSSEGHPGRGIDVRRRKIWDMYGPQTQLEEDAITPNDKTLFPDVDWLIGNHSDELTPWIPVIAARSSYNCRFFVLPCCFFDFIGRYSRRQSKKTQYREYLDFIKEVGFTCGFHVDEDCLRIPSTKRVCLVGKSRTYPSSREASVDEKRTQYIKSRRGCPVSPPGWELSPSPRWVAAGSAGHCDGQQALDARVGCVTRAWAAEHGAGPQAEGPWLPGFHPREKAERVRNCAALPRDFIDQVVLQVANLLLGGKQLNTRSSRNGSLKTWNGGGKLSTILGRG

SEQ ID NO: 6788 - DNA, 2142 bp, Mus musculus
  CDS (1)..(2142)
atggaggagctgggtagagtgcggctaagcgatcctgatgccctgctacctgcaggcttctgggccgccgtgaccgtgtggctggagaggccacaggtggccaacaagaggctgtgcggcgcccgcatggaagcccgcgggagaactttgcggtcccacgcccaggcggagtgtggaccgcggcagggacagggacacgggctggagagggaacccggacaggcttctcctaaaggagagccagagtcgggacctagggcgagccgcgaaggcaccgctcccgcggctgacctgaactcgctatgggaccgagtctcccaaagcctcgtccacgccaatccggaaatgctggccttcctctgtggcccctcgttgggtcctcagcctgaagccgcgcaggagctcgacctgattctcaggactgtcatcccgaaagcgagcccgcactccccactcacagagccgaagaaagaactggtagtgcaagatgtctccagtgggagtgtcacctttttgcccttggaagaagataatgaggggaatttggaggttaaaacgagcaacgtgtatcaactccatctccatcacaacgaaggagaatggttcatatctgttttaattttctgtccagagagatggcattcagatggtgttgtctatcctaagcctgcctggctcggagaagaactgctgtccaagctggccaggtgggcggtggagaacaggaagagcgagtttaaaagcacactttccctggtgtctatcctgcgctatagcaggatgtaccaggagctcaaagagaaatacagagacatggtaaaggtttggcctgaagtaacagatcctgaaaagtttgtctatgaagatgtggccattgctacgtatctgctgatcctatgggaagaggaaagggctgagaagggagtcaccaccaagcagtctttcgtggacttggggtgtggaaatggccttctggtccacatcttgagcaacgaggggcacccaggtagagggattgatatccgaagaagaaaaatctgggacatgtatggaccccaaactcagctggaggaaggctccatcactccgagtgacgagaccctgttccctggtgttgattggctgattggtaaccattctgatgagctcaccccctggatccctgtcattgcagccaggtcttcctacacctgtcgtttctttgtcctgccctgctgttttttcgactttgtggggcgataccagcggcagcagagcaggaagacacagtaccgagagtatctggactttgtgctggaggtggggctctcctgtggcttccacgtgcaggaggactgcctcaggattccttctactaagcgggtctgcctcattgggaaatccagaacatacccgccttctgcagaggtctggatggatgagcagagaacgcgatacctgcacagcagacagggccatccacagagccggcctggaggggcacatgcaccttctgcaccgcagactgctgctcatgacgctggtctccagtacagttgcaggaccgtcaatgctgggtctgagtgcgtgctggagggcctggctgctgagcgaggagctggagccccagccccaggactctgggtgcctgggttctgccctagagaaaaggccgagcgtgtgaggaattgtgcagccctccctcgagacttcgttgaccaagtggttttgcaggtggcaaacttgttgttagatagaaagaagttcaacacaggaaactctgaagccaggagtctgaagccctggaatggaggagggagcctttccttggcagaagtggctgcagaactaaactcagagacgctgcagcggctgaagcgggagtgtggaggcctacagacccttctcaagaatagccatcaagtgtttgaagttctgaatgggcgcgttcacatccgtgactggcggcaggagctgcagaggggaaagcctccagaagccaagcagaacctgtctgcagcagtgttcaagactcggatctgctggttcttcgcccaccatcctgatggctgcgtactgcctgctgcccaatgcccctttgcccatgggcccgaagagctgcgcctgtcacagaccttgaagaagcagaggcaggctccctga

SEQ ID NO: 6789 - protein, 713 aa, Mus musculus
MEELGRVRLSDPDALLPAGFWAAVTVWLERPQVANKRLCGARMEARGRTLRSHAQAECGPRQGQGHGLEREPGQASPKGEPESGPRASREGTAPAADLNSLWDRVSQSLVHANPEMLAFLCGPSLGPQPEAAQELDLILRTVIPKASPHSPLTEPKKELVVQDVSSGSVTFLPLEEDNEGNLEVKTSNVYQLHLHHNEGEWFISVLIFCPERWHSDGVVYPKPAWLGEELLSKLARWAVENRKSEFKSTLSLVSILRYSRMYQELKEKYRDMVKVWPEVTDPEKFVYEDVAIATYLLILWEEERAEKGVTTKQSFVDLGCGNGLLVHILSNEGHPGRGIDIRRRKIWDMYGPQTQLEEGSITPSDETLFPGVDWLIGNHSDELTPWIPVIAARSSYTCRFFVLPCCFFDFVGRYQRQQSRKTQYREYLDFVLEVGLSCGFHVQEDCLRIPSTKRVCLIGKSRTYPPSAEVWMDEQRTRYLHSRQGHPQSRPGGAHAPSAPQTAAHDAGLQYSCRTVNAGSECVLEGLAAERGAGAPAPGLWVPGFCPREKAERVRNCAALPRDFVDQVVLQVANLLLDRKKFNTGNSEARSLKPWNGGGSLSLAEVAAELNSETLQRLKRECGGLQTLLKNSHQVFEVLNGRVHIRDWRQELQRGKPPEAKQNLSAAVFKTRICWFFAHHPDGCVLPAAQCPFAHGPEELRLSQTLKKQRQAP

SEQ ID NO: 6790 - DNA, 1509 bp, Schizosaccharomyces pombe 972h-
  CDS (1)..(1509)
atgaaggttcctgcgtattggaagccgcgagaaccaaaaaatgctttgacatgtgatccacctgttccttatgacttgcagtcatcttaccaatggcaatccattttggagcacgatacctgctatgcagctgaggtatttgacaaaatgatgatagaattagtctatcatccagagcggacaagcagtgttatcatgcgaacagacataattcttgattctcaagaggatgattcaattctaaacaagcagaaatcagttttcgaaaatcttgacgaaaggtaccaaatttcaaggtggatcgatcgtcgaattattcctcgtaatactaatttggatgcgacaatggaccaaacggttgttgtgctacatgagaagcttgaaaatgatcgtatattaatgtacttacctcacctggacaaaagtttggaacagccctataatcatcttccatactatcatcccgcagtagctggaattgcttttcattacaaaggatcaagtgttgaggttttatatttagtagaaaaggattttcaaagggaattgtcttcccgtttattgcgaacagctcatatgcttttacttgttttacacaagcattgcaagggggcagtggaagggtaccaaaaacgcatgcttcacgacactgttgtggaaagaaacaagtttcaagatacctatgttattctgaaagataaatacgccaagcaacttgttgacaattgggtagaaaaaacggatcctggtaaacacgttttcgaagatttggctattgcagcatttcttatagaattgtggaaacaaacttattcatcaaacaaagaatttagttttgttgatgttggttgcggaaatggtttacttgtttatctgttgttaatggagggctataatggatatggcttcgacgctagaaaaagaaaatcatgggagacatatcccctttgggttcaagtaaagttatacgaaaaagttcttgtaccctattttctgcatgattttgaaacaaagattccatttcctcagctgcctgccggtttcactatgtccgctgcaaacattcatgacggtcgattttctgaaaactcattccttatcggaaaccatgcggatgaattgactccttatcttcccattttagcaagattaaatcagaaatgctatttcatgtcgattccttgttgcgttcatgatctgacaggtgctaaaatttcctgggcattaccgaaacctcgaaatcccaaacatggaggaagatacgccatgtacattgaatggctcatgcagctgtcagaggaggtaggttggaatatcgaggttgaaccactacgcattcctagcaccagaaattacgctcttataggtagaaaattactatcgaatgatctgctgcactccagtttaagcaccgatgctttgtacgacatcgtagaaaaaaatcatggctcacaagggttttttgtccatgctatgcaagttgcagcggctaattctcggtctcattag

SEQ ID NO: 6791 - protein, 502 aa, Schizosaccharomyces pombe 972h-
MKVPAYWKPREPKNALTCDPPVPYDLQSSYQWQSILEHDTCYAAEVFDKMMIELVYHPERTSSVIMRTDIILDSQEDDSILNKQKSVFENLDERYQISRWIDRRIIPRNTNLDATMDQTVVVLHEKLENDRILMYLPHLDKSLEQPYNHLPYYHPAVAGIAFHYKGSSVEVLYLVEKDFQRELSSRLLRTAHMLLLVLHKHCKGAVEGYQKRMLHDTVVERNKFQDTYVILKDKYAKQLVDNWVEKTDPGKHVFEDLAIAAFLIELWKQTYSSNKEFSFVDVGCGNGLLVYLLLMEGYNGYGFDARKRKSWETYPLWVQVKLYEKVLVPYFLHDFETKIPFPQLPAGFTMSAANIHDGRFSENSFLIGNHADELTPYLPILARLNQKCYFMSIPCCVHDLTGAKISWALPKPRNPKHGGRYAMYIEWLMQLSEEVGWNIEVEPLRIPSTRNYALIGRKLLSNDLLHSSLSTDALYDIVEKNHGSQGFFVHAMQVAAANSRSH

SEQ ID NO: 6792 - DNA, 1410 bp, Drosophila melanogaster
  CDS (1)..(1410)
atgtctctaaaagaggatccaagccagcgcacgtgcacaggatttacgatcggattcaaactgctgtccaagaaactggcggaaaacatcctaggcaccggaattgtggattttgagaattgtctctatgagtgccaatttgccagcgatagcattgaaggcttttccgtgggcctccttggaggagagtttaaactgaagtccaaatcgaacaccaactggttggaatttgtgctcagaccaaagctcttaagctggtctcagtccaagcaggatgaagcaaaggtgaagtcactaggtttggttaatgtggaaaagtacaatgatctgtacaaggagttgaaacagaggcattcacaacgcctgctggaacactggaagaccgcacaggagtccacggatccgctcaagttcatttacgaggatttggctatcgctgcttatcttatagttttgtggagtcaaacacaatcggagcccactgccttcgctgatttgggttgtggaaacggtctgttagttcatgtcctcaacgccgagggctacaaagggtatggctacgatataagaaagcgaaagctatggtccctctatccaccggatacccaaaggagcctcattgaaaaggccgtggagcccaacagcttccgcttggattttccgggtgtggattggttgattggtaaccattcggacgagttgtctccttggctaccggttttggctggtcgtttgaacattaactatttcctactgccctgctgtccctttgaactgtcgggagccaagtttcgcaggcggaatacgaagataagtgcctaccaggatttctttcaatacgtcactcaggtctctcatgaatgtggctatgagatcctacaagaccgtctaaaaataccaagcaccaagcgattggctctgctgggaattaagagaaaagcctcaaaggctattgaagatctggagtactttgtccaagaagagctaagaaagtataagaccggagatgccaaaattaagctgcgcgagaaggaggagagcgttcgaaattgcacgcaggtggataagaccataattgatggtctagtgtttaagatcttcaaactgattctggactctaacgaagataaatggtctggtcgtctgcccatgagagagattgcccaggctctcaccaaggaggagctgagtggcattaaatccgagtgcggcggcatcaaaacattgctgcgcaataaacacgaagttttcgaattctgcggtggtgatctcataggaataagaacccctaaaccaacggctactctccccaaatcccatttgaccatcaagaaacgtagctgctttttcaagcttcatcatccgctgggatgtcctctcgatgatgctgagtgctcgtttatacactaa

SEQ ID NO: 6793 - protein, 469 aa, Drosophila melanogaster
MSLKEDPSQRTCTGFTIGFKLLSKKLAENILGTGIVDFENCLYECQFASDSIEGFSVGLLGGEFKLKSKSNTNWLEFVLRPKLLSWSQSKQDEAKVKSLGLVNVEKYNDLYKELKQRHSQRLLEHWKTAQESTDPLKFIYEDLAIAAYLIVLWSQTQSEPTAFADLGCGNGLLVHVLNAEGYKGYGYDIRKRKLWSLYPPDTQRSLIEKAVEPNSFRLDFPGVDWLIGNHSDELSPWLPVLAGRLNINYFLLPCCPFELSGAKFRRRNTKISAYQDFFQYVTQVSHECGYEILQDRLKIPSTKRLALLGIKRKASKAIEDLEYFVQEELRKYKTGDAKIKLREKEESVRNCTQVDKTIIDGLVFKIFKLILDSNEDKWSGRLPMREIAQALTKEELSGIKSECGGIKTLLRNKHEVFEFCGGDLIGIRTPKPTATLPKSHLTIKKRSCFFKLHHPLGCPLDDAECSFIH

SEQ ID NO: 6794 - DNA, 1590 bp, Caenorhabditis elegans
  CDS (1)..(1590)
atgtttcctggttcaacatggacagttattgtagaacaaatcgccgaatacgaagaggttattgatccaaaagcgttttttgataagattatcagtctttggaaggaatatccaaacgctatcagtaacagaattacaacttcagtttcagtggatacagattcagatttatggaatgaagttttaagaacatttgaaacacattacaaattttgcccgagagattgcagcgaaatagctattacgaaaatcatacacaaggatctcgctaataataaattctcagataatgcgtttgaagtttcttactatgaagaagaactccttgtacgattctacccaattactctcgatggaatgcaacacccacatttcgagagcccgtattcaattgccattaaaatcccaacagatacatccattcaacttcagtttttgaagcaagctaattcctctcaagaacattttgaatttatgaagaaacaagcattcaaacaattgtacacttggttgaaaggaattgatctttcaaaatcatctcgaaagacaaattctctactcgacaaagagtcctacatcaagacatatcgtcatattcgagaggattatggcagaggaatgatcaaaggatggacagaaaactctaatccacaaaaatcaattttcgaggattgtgggattgcttcatatataaatgagcttgtcaattctgatctcctaccaaagccgaataaattcgtggatattggatgcggaaatggtcttcttgttcatcttttgaacaaaatcggaatgtctggatacggaattgacgttcgtcatcgaaacatttggaagaccactctgaaagatgtggacctacgcgaaatgcctgtcgatcctcaaattgtcgttcaaaatgaaccgcacttcgatttagatgtggatttgctcattggaaatcacagtgacgagttaactccatggattccagttatggctgctaaactcaactgcaatttcttcttgattccatgttgcccattcaactttttcggaaagtatgccaacaacggaagccacttaggaccaaaaagaataattggcgattccgagcacgaaaagaaaggaggactatgcccaaatgtggacgaaaccatcaattcaatgactgaaggacaaaagtttattgcaagaccaaaggaaatcaaaacaacgaattgtatgaacattcctgtgactgatcgtgaaagaatcgccaagaaattatttgattttgttttgaattattctgatgcagtcagagatggatggcgttgtggaggtgaagttcctttggcccagcttgctgcgcttctcacagaagaagacaaaaaactaatgaaagatcaggacggaggacttcaaacttttcttcgaaatcaacatcaaatctttcacgtataccaagccactgctcgtcttcgtgatttccgtcagccagttgttcaaaaacgtcaatcctggaagccaaaaaaggcggaaacgatcagaaaagcaccatgctggatgtcacttcatcatccagatggttgtccagttggacaagaagcttgtcgttatgaacattaa

SEQ ID NO: 6795 - protein, 529 aa, Caenorhabditis elegans
MFPGSTWTVIVEQIAEYEEVIDPKAFFDKIISLWKEYPNAISNRITTSVSVDTDSDLWNEVLRTFETHYKFCPRDCSEIAITKIIHKDLANNKFSDNAFEVSYYEEELLVRFYPITLDGMQHPHFESPYSIAIKIPTDTSIQLQFLKQANSSQEHFEFMKKQAFKQLYTWLKGIDLSKSSRKTNSLLDKESYIKTYRHIREDYGRGMIKGWTENSNPQKSIFEDCGIASYINELVNSDLLPKPNKFVDIGCGNGLLVHLLNKIGMSGYGIDVRHRNIWKTTLKDVDLREMPVDPQIVVQNEPHFDLDVDLLIGNHSDELTPWIPVMAAKLNCNFFLIPCCPFNFFGKYANNGSHLGPKRIIGDSEHEKKGGLCPNVDETINSMTEGQKFIARPKEIKTTNCMNIPVTDRERIAKKLFDFVLNYSDAVRDGWRCGGEVPLAQLAALLTEEDKKLMKDQDGGLQTFLRNQHQIFHVYQATARLRDFRQPVVQKRQSWKPKKAETIRKAPCWMSLHHPDGCPVGQEACRYEH

SEQ ID NO: 6796 - DNA, 1617 bp, Caenorhabditis elegans
  CDS (1)..(1617)
atgtttcctggttcaacatggacagttattgtagaacaaatcgccgaatacgaagaggttattgatccaaaagcgttttttgataagattatcagtctttggaaggaatatccaaacgctatcagtaacagaattacaacttcagtttcagtggatacagattcagatttatggaatgaagttttaagaacatttgaaacacattacaaattttgcccgagagattgcagcgaaatagctattacgaaaatcatacacaaggatctcgctaataataaattctcagataatgcgtttgaagtttcttactatgaagaagaactccttgtacgattctacccaattactctcgatggaatgcaacacccacatttcgagagcccgtattcaattgccattaaaatcccaacagatacatccattcaacttcagtttttgaagcaagctaattcctctcaagaacattttgaatttatgaagaaacaagcattcaaacaattgtacacttggttgaaaggaattgatctttcaaaatcatctcgaaagacaaattctctactcgacaaagagtcctacatcaagacatatcgtcatattcgagaggattatggcagaggaatgatcaaaggatggacagaaaactctaatccacaaaaatcaattttcgaggattgtgggattgcttcatatataaatgagcttgtcaattctgatctcctaccaaagccgaataaattcgtggatattggatgcggaaatggtcttcttgttcatcttttgaacaaaatcggaatgtctggatacggaattgacgttcgtcatcgaaacatttggaagaccactctgaaagatgtggacctacgcgaaatgcctgtcgatcctcaaattgtcgttcaaaatgaaccgcacttcgatttagatgtggatttgctcattggaaatcacagtgacgagttaactccatggattccagttatggctgctaaactcaactgcaatttcttcttgattccatgttgcccattcaactttttcggaaagtatgccaacaacggaagccacttaggaccaaaaagaataattggcgattccgagcacgaaaagaaaggaggactatgcccaaatgtggacgaaaccatcaattcaatgactgaaggacaaaagtttattgcaagaccaaaggaaatcaaaacaacgaattgtatgaacattcctgtgactgatcgtgaaagaatcgccaagaaattatttgattttgttttgaattattctgatgcagtcagagatggatggcgttgtggaggtgaagttcctttggcccagcttgctgcgcttctcacagaagaagacaaaaaactaatgaaagatcaggacggaggacttcaaacttttcttcgaaatcaacatcaaatctttcacgtgagcactacggcaatagataagaaggtataccaagccactgctcgtcttcgtgatttccgtcagccagttgttcaaaaacgtcaatcctggaagccaaaaaaggcggaaacgatcagaaaagcaccatgctggatgtcacttcatcatccagatggttgtccagttggacaagaagcttgtcgttatgaacattaa

SEQ ID NO: 6797 - protein, 538 aa, Caenorhabditis elegans
MFPGSTWTVIVEQIAEYEEVIDPKAFFDKIISLWKEYPNAISNRITTSVSVDTDSDLWNEVLRTFETHYKFCPRDCSEIAITKIIHKDLANNKFSDNAFEVSYYEEELLVRFYPITLDGMQHPHFESPYSIAIKIPTDTSIQLQFLKQANSSQEHFEFMKKQAFKQLYTWLKGIDLSKSSRKTNSLLDKESYIKTYRHIREDYGRGMIKGWTENSNPQKSIFEDCGIASYINELVNSDLLPKPNKFVDIGCGNGLLVHLLNKIGMSGYGIDVRHRNIWKTTLKDVDLREMPVDPQIVVQNEPHFDLDVDLLIGNHSDELTPWIPVMAAKLNCNFFLIPCCPFNFFGKYANNGSHLGPKRIIGDSEHEKKGGLCPNVDETINSMTEGQKFIARPKEIKTTNCMNIPVTDRERIAKKLFDFVLNYSDAVRDGWRCGGEVPLAQLAALLTEEDKKLMKDQDGGLQTFLRNQHQIFHVSTTAIDKKVYQATARLRDFRQPVVQKRQSWKPKKAETIRKAPCWMSLHHPDGCPVGQEACRYEH

SEQ ID NO: 6798 - DNA, 1596 bp, Eremothecium gossypii
  CDS (1)..(1596)
atgacgttcgagttctgcggtggcgaaagcagcatcctgggaggagcatgggtctgtatctaccagacagcggaagatgtgggcttccagcgggagcactttgaacaggcgatggacaacgtgatacgtcatccgaacataaactcaacggtgctgctcagagcggacatcgtggcggaaagggagtacgactgccggacaggggaggcggtgcgggacggcaattgcggcgccgcggcggacgtggcagaaggcatgctgtcggtggggcttgaggacgtggcagcgcgcagcgtgcacacggagcttgacttggcggtgaagctggagtttgtgcggcgcctggttccgcgcaacccgtacaaggacgcactgatcaaccagacgtgtctggtgctgaacacgcgcgagccgtccgagactgcgctggtggtgtacttgccgcacttcagcgagcgcgaggactgcccgttctacattccgccggtggcggcagtgggcatccttctgcatggcgggcggctgtccgtgcactacatcccgtttgcaggcgagggcgcggcgctcgcggacgagggacagcgggcggtgcgcacggcgcggcgcctcctccagacggcggagaagcactcgaaaggttgcatgaatgggtatacgaagcgggtggagcacgacgtagtggtggacaaggttctattccaggagcgctacatacaactcaagaaaaagtactcgcagtggctggtcgacaactgggcagagagcacggacccccgcaagcatgtgttcgaggacatcgcgatcgcggcgtttctaatcgagttgtggagcaagatctacggccagcacgcggaagacaagtttcggttctgcgacatggggtgcggcaacggcgtgctgtgctacatcctgctcatggagggctacgcgggcgaaggcatcgacgcccgccggcgcaagtcgtggggcatgtttcccgagaacgtgcgcagctgcctcaaagagcagctggtaattccatccctgctgctgcgtccgcaccccgagatacgcaagatggcctcgcacatggagcacaacggcggcttttttcccgtccacgtcagctcctctcaactgatggcgcccgccaccatcgtatattccgcggcggacctgatcacctcaccgcaggtcaatattgcagaattccctcccaatacgtttctcataggcaatcactcggatgagctgacctgttggattccgctgttgggccagccgttcatggtcatcccgtgctgttcacacaacttccatggagcccgcgtgcgctaccgcccgtcccgcgagtccgccaccaggctaggtaacagcacctacgccggcctcgtcgactacgtggagtacctggcgaaggctgttggctgggagaccgagaaggagatgctgcgcatacctagcaccaggaatgcggcaataataggctacaagaatcccgcgctgggccagtttccgacgcaacaggtctatgatgaagtgctaaagaatggtggagcagaaggttggattcaaagtgcaacggcgttgctgaaaggcacacctaagtcacactag

SEQ ID NO: 6799 - protein, 531 aa, Eremothecium gossypii
MTFEFCGGESSILGGAWVCIYQTAEDVGFQREHFEQAMDNVIRHPNINSTVLLRADIVAEREYDCRTGEAVRDGNCGAAADVAEGMLSVGLEDVAARSVHTELDLAVKLEFVRRLVPRNPYKDALINQTCLVLNTREPSETALVVYLPHFSEREDCPFYIPPVAAVGILLHGGRLSVHYIPFAGEGAALADEGQRAVRTARRLLQTAEKHSKGCMNGYTKRVEHDVVVDKVLFQERYIQLKKKYSQWLVDNWAESTDPRKHVFEDIAIAAFLIELWSKIYGQHAEDKFRFCDMGCGNGVLCYILLMEGYAGEGIDARRRKSWGMFPENVRSCLKEQLVIPSLLLRPHPEIRKMASHMEHNGGFFPVHVSSSQLMAPATIVYSAADLITSPQVNIAEFPPNTFLIGNHSDELTCWIPLLGQPFMVIPCCSHNFHGARVRYRPSRESATRLGNSTYAGLVDYVEYLAKAVGWETEKEMLRIPSTRNAAIIGYKNPALGQFPTQQVYDEVLKNGGAEGWIQSATALLKGTPKSH

SEQ ID NO: 6800 - DNA, 2271 bp, Rattus norvegicus
  CDS (1)..(2271)
atgctcttccgggtcgcgtcatcccaatgcgccgagagcgcagatatggaggagctccgtagagtgccgctagacgaccctgattctctgctacccggaggtttctgggccgccgttaccgtgtggctggagaggccacaggtggccaacaagaggctgtgtggcgcccgcatagaagcccgtgggagaactttgcggcccagtgcccaggcggagtgtggaccgcggcagggacaggggcacgggctggagagggaaccgggacagggatctagggcggaccgcgaaggcaccgctcccgcggctgacctggacttgctatggaaccgagtctcccaaagcctcgtccactccaatccggaaatactgaccttctatggcccctcgttgggttctcctcctgaagccgcgcaggagctcgacctggttctcagaaccgtcatcccgaaagcgagccctcacttcccctttacagagccgaagaaagaactggtggtgcaagatgtttccagtgggagtgtcacctttttgcccttggaagaagataatgaggagaatttggaggttaaaatgagcaatgtgtatcagctccgtctccatcacagcgaaggagaatggttcatatctgttttaattttctgtccagagaggtggcattcggatggtgttgtctaccccaagcctacctggcttgcagaagaactgctgtccaagctggccaggtgggcagtggagaacaggaagagcgagtttaaaagcacactttccctggtctccgtcctgcgctatggcaggatgtaccaggagctcaaagagaagtacagagacatggtaaaggtttggcctgaagtaaccgatcctgaaaagtttgtatatgaagatgtggccatcgctacatacctgttgatcctatgggaagaggagagggctgagaagggcatcaccaccaagcagtctttcgtggacctggggtgtggaaatggccttctggtccacatcctgagcaacgaggggcatccaggcagagggattgatgtccgaagaagaaaaatctgggacatgtatggaccccaaactcagctggagctgccactggacctgccctgccctccgctgccccacatgcccacagctgccactggacctgccctgccccctgctgccccacacacgcccatagccattgctctatctgaaggttccatcactccaagtgacaagacactgttccctggtgttgactggctgattggtaaccattctgatgagctcaccccgtggatccctgtcattgcagccaggtcttcctacacctgtcggttcttcgtcctgccctgctgtttttttgactttgtagggcgataccggcggcggcaaagcaagaagacacagtaccgagagtacctggacttcgtgctggaggtggggctctcctgtggcttccacgtacaggaggactgcctcaggattccgtctaccaagcgggtctgcctcattgggaaatccagaacatacctgccttctgcagaggtctggatggatgagcagagaacacgatacctgcacagcagacagggccttccacagagcctgcctggtgggggacatgcaccttctgtaccccagattgctgctcacgatgacgatgctggtcaccaggacagtcacaggacctttgatgctggggctgagtgcatgccagagggcctggctgctgagcgaggaacaggagccccagccacaggactctgggtgcctgggttctgccctagagaaaaggctgagcgtgtgaggaattgtgctgctctccctcgagacttcattgaccaagtggttttacaggtggcaaacttgttgttagatggaaagaggttcaacacgggaaactctgaagccgggagtctgaagacctggaatggaggagggagcctttccttggcagaagtggctgcagaactaaactcagaaacgctgcagcagctgaagcgggagtgtggaggcctacagaccctgctcaggaatagccatcaggtgtttgaagttctgaatgggcgagttcacatccgtgactggcggcgggagctgcagagggaaaagcctccagaaggcaagaggagcctgtctgcagaggtgttcaagactcgaatctgctggttcttcactcaccaccctgatggttgtgtactgcctgctgcctgttgcccctttgcgcatgggctggaagagctgcgcccgtctcagaccttgaagaagcagaggcaggctccctga

SEQ ID NO: 6801 - protein, 756 aa, Rattus norvegicus
MLFRVASSQCAESADMEELRRVPLDDPDSLLPGGFWAAVTVWLERPQVANKRLCGARIEARGRTLRPSAQAECGPRQGQGHGLEREPGQGSRADREGTAPAADLDLLWNRVSQSLVHSNPEILTFYGPSLGSPPEAAQELDLVLRTVIPKASPHFPFTEPKKELVVQDVSSGSVTFLPLEEDNEENLEVKMSNVYQLRLHHSEGEWFISVLIFCPERWHSDGVVYPKPTWLAEELLSKLARWAVENRKSEFKSTLSLVSVLRYGRMYQELKEKYRDMVKVWPEVTDPEKFVYEDVAIATYLLILWEEERAEKGITTKQSFVDLGCGNGLLVHILSNEGHPGRGIDVRRRKIWDMYGPQTQLELPLDLPCPPLPHMPTAATGPALPPAAPHTPIAIALSEGSITPSDKTLFPGVDWLIGNHSDELTPWIPVIAARSSYTCRFFVLPCCFFDFVGRYRRRQSKKTQYREYLDFVLEVGLSCGFHVQEDCLRIPSTKRVCLIGKSRTYLPSAEVWMDEQRTRYLHSRQGLPQSLPGGGHAPSVPQIAAHDDDAGHQDSHRTFDAGAECMPEGLAAERGTGAPATGLWVPGFCPREKAERVRNCAALPRDFIDQVVLQVANLLLDGKRFNTGNSEAGSLKTWNGGGSLSLAEVAAELNSETLQQLKRECGGLQTLLRNSHQVFEVLNGRVHIRDWRRELQREKPPEGKRSLSAEVFKTRICWFFTHHPDGCVLPAACCPFAHGLEELRPSQTLKKQRQAP

SEQ ID NO: 6802 - DNA, 1212 bp, Anopheles gambiae str. PEST
  CDS (1)..(1212)
atggcctccattcgatcccttacgctcgtggacaatctggagcagtacaattgtcttttcaacgagctgaaacaaaagtatggccaatcgatggtatcgatctggccggagtgtaccgatccgcagaagtttgttttcgaagacatcgcgatagcagcgtacctgttgatgctttggagaaaggagcgaacggcgaaggggctcgagtcgcttcagtcgtttgtggacattggctgcggcaatggactgctggtatacattctagcatcggaaggtcatcgaggttacgggatcgatttaaggaaacggaagctgtgggatatgtatccggccgagccgaaggttgacttgcgcgtcgaaacgatcgtaccgtccagctcgtcgctgttccccgacatcgactggatcattggcaaccattcggacgaactttcgccctggattccggtgattgcggcacgaagctcgtaccggtgccgctttttcctgctgccctgctgtgcgtacgagttcgatgggcgtaaatatcagcggcaaaactgttccctcagccagtacggggattttctgaattatgcagcagaaattgcacgcgtctgtggatttgcggtggagacggatcgcttgcgtatacccagtacgaagcgcacgtgtctggtgggaagcaccagaacggttgaaatggaagaaaaattagcacaaaatggtataacagaggagaatgtgcccagttccggcagctggtcggcaggatttaaaccaagggaaagcacggaaaagatacgcaattgtacgaaaatcgatcgatccgtggtggataagattgtggcgattgtgttcggggagctgctcgcaaagcgacgcattccggcagagtttgccgaacgcagctggaacgctggagggacgctagcactagaggaactagtgaaagcgatcccgcaggagctgctcgttgcgctaaaggcagagtgtggtgggctgcaaacgctgttgcgcaacaatcatcaaattttccgcgtcgaaaagggaacagtgcagctacgcataccgacccgaatatcggacacggtcgatgcggcccttgcgaggaaaatgaagaaggtgaagaactttaaaccgattaactttaagcaacgtgtttgttggtttttcgtcaaccatccggatggttgcccgttggcagagaaggactgtaagttcaaccactag

SEQ ID NO: 6803 - protein, 403 aa, Anopheles gambiae str. PEST
MASIRSLTLVDNLEQYNCLFNELKQKYGQSMVSIWPECTDPQKFVFEDIAIAAYLLMLWRKERTAKGLESLQSFVDIGCGNGLLVYILASEGHRGYGIDLRKRKLWDMYPAEPKVDLRVETIVPSSSSLFPDIDWIIGNHSDELSPWIPVIAARSSYRCRFFLLPCCAYEFDGRKYQRQNCSLSQYGDFLNYAAEIARVCGFAVETDRLRIPSTKRTCLVGSTRTVEMEEKLAQNGITEENVPSSGSWSAGFKPRESTEKIRNCTKIDRSVVDKIVAIVFGELLAKRRIPAEFAERSWNAGGTLALEELVKAIPQELLVALKAECGGLQTLLRNNHQIFRVEKGTVQLRIPTRISDTVDAALARKMKKVKNFKPINFKQRVCWFFVNHPDGCPLAEKDCKFNH

SEQ ID NO: 6804 - DNA, 1365 bp, Magnaporthe grisea 70-15
  CDS (1)..(1365)
atggttaatgccgttaaaaacccaaacctcttgtctagctggctgttccgggcggaaatattgtccgagatcgaacatgaccaggccgaggtgtgccctgtgcagggggaatccacgctacctcggtgcccggctctgcaagggttcaggctcgaaagagcgtatcttcgacaaattatcccacgaaacaccaggagagacagtccaatgattcagagctgcaccttctatgtggattccgctcaagacccagatacaggcattaggagaagtctcgtgctctatctccctcatctggattccacagaggagtttccctactatcatccccgagtccgaggcgttggtctgcttcacgagtggaacgatgagcagggcaaaggcaccttctctatccactaccagctgtttcccgaggggtcaatgactcccaggctgcaaagcacagcccttaatatgctctcaatactacacaagctcggccagggccaactcaatggctacgttaagcgagtgcatcatgacagattagttccaaagtcggcactacaagacagatactcgggcctcagagatcgctatgccaaggagcttgtcggggggtgggcagaatctacagaccccatgaagcacgtatttgaagatctctgcatagctgcattcttgattgaactttgggcagagatgtataagacgctcgaattcccaggctttgtggacattggtgccgggaatggcctcctggtccatatcctgaacctggaaggttaccgtggctggggtttcgatgctagagctcggaaatcttggcatgtctacaacggtcttcaagcagatggtcagccaactctgcaggaattggttttaatcccctcactcgttggccaggaagtctctccaggtaaaaatgacgtagaagtctcgccacagaccgtgggggtccacaatggcgtgtttcccaaagggaccttcatcatatccaaccatgcagacgagctgactccctggacgccgctgatcgccaccgcttctggatgtccattcctagccatcccatgctgcagtcacaacttgaccggcgccaggttccgggccccacggccaacagacaagagcaagtcgcactctgcctattccagtctcgtggcctgggtttccgatatcgcgaccgactgtgggtgggaagtagagtccgagatgctgcggatacctagtactagaaacacggctatcgtcggaaggcatcgtacagttgatatcaccgaggtggccatcgaccaagttattgccaggtacgggggttctggcgattactgtgagaacgccatgaaacttgtcaagtccatctctccacggagacactag

SEQ ID NO: 6805 - protein, 454 aa, Magnaporthe grisea 70-15
MVNAVKNPNLLSSWLFRAEILSEIEHDQAEVCPVQGESTLPRCPALQGFRLERAYLRQIIPRNTRRDSPMIQSCTFYVDSAQDPDTGIRRSLVLYLPHLDSTEEFPYYHPRVRGVGLLHEWNDEQGKGTFSIHYQLFPEGSMTPRLQSTALNMLSILHKLGQGQLNGYVKRVHHDRLVPKSALQDRYSGLRDRYAKELVGGWAESTDPMKHVFEDLCIAAFLIELWAEMYKTLEFPGFVDIGAGNGLLVHILNLEGYRGWGFDARARKSWHVYNGLQADGQPTLQELVLIPSLVGQEVSPGKNDVEVSPQTVGVHNGVFPKGTFIISNHADELTPWTPLIATASGCPFLAIPCCSHNLTGARFRAPRPTDKSKSHSAYSSLVAWVSDIATDCGWEVESEMLRIPSTRNTAIVGRHRTVDITEVAIDQVIARYGGSGDYCENAMKLVKSISPRRH

SEQ ID NO: 6806 - DNA, 1539 bp, Gibberella zeae PH-1
  CDS (1)..(1539)
atggagaatcggaagaaggctccattcgagcctgaggaataccctccaggatccttgcccttgctccatgaacaatgtggcgaagcaagctggatacctatgtgccgccacgcatgcacatttgagactcggcactttgacgagattatgctcaatcttgttgagaacccaaacctcaactccaaatggctcttccgtgcagatgtcatccatgatgagagcagtcactctcctgtccctgcagacgtcaaaatcaccgaggacagcccccgtactcgggactttgagggattcagtcgccaaagaacgatggtgcgtcggctgataccacgaaacactcttcgtgatgcccccttggatcagacatgcgcattctaccactcccgtcctggagcaggggaattagactctggagggcaaactgatttgatgcgatctctcgtcttgtatatgccacatgcgtcttctgcaggaaagctgcctttttatcaccccaaggtcaaaggtatctgtcaacttcacgaatggaatcaatccacagagataggcaccgtatctgtccacttcttactttttgacggcgaagaagacggtgaagaggtggaccaagtcaaactcggtagaatcgcttatcacttacttcaaaccatccataagcatgggcacggcacggctgcaggatacatcaagagggtcaatcacgacgtggttgttcccagagagcggttccaggacaagtactctgaactcaagaacaaatacgccaggtctctggtgcaatcttggctcgagaccactgatcctgcaaaacacgtgtttgaggatctaggcatcgctgcgtttctgatcgaactatggcgagatatgtacagaggtgtagatttccctggcttcgtggacatcggctgcggaaacggtctgttagtccatattctgaagcttgaaggatatgatggctggggctttgacgcccgcgaacgcaagtcatggtcccagtacaactcctcattctccggctcaccctctggaaaatctctccaaagacgactcctactccccagcatcatacctgtggaaacacccgatgcgaatacaaaggttatcgaccccaaggatgttcacgatggcacgttcccgaaaggcacattcatcatttcgaatcatgccgacgaactcacaccgtggacacccatacttgccgctatatcacagtgtccctttatctcaatcccgtgttgcagtcacaatctcacgggcgacaggtggcgagcccctccaccacgcgacaagtccaagccgaagagtatgtttgcatcgttggtcgattgggttgcacaaattgcagaggactgtggatgggacgtcgagacagaaatgttgaggattccaagtacgaggaacacaggcttggttggccgcagaaacacaaaaggtgctgaagaaatcgacatgcatgcggtgttacaaaagtacggaggagttcagggatattacagcaatgtcgcaaaactactcaaatcaactcctagaggccactga

SEQ ID NO: 6807 - protein, 512 aa, Gibberella zeae PH-1
MENRKKAPFEPEEYPPGSLPLLHEQCGEASWIPMCRHACTFETRHFDEIMLNLVENPNLNSKWLFRADVIHDESSHSPVPADVKITEDSPRTRDFEGFSRQRTMVRRLIPRNTLRDAPLDQTCAFYHSRPGAGELDSGGQTDLMRSLVLYMPHASSAGKLPFYHPKVKGICQLHEWNQSTEIGTVSVHFLLFDGEEDGEEVDQVKLGRIAYHLLQTIHKHGHGTAAGYIKRVNHDVVVPRERFQDKYSELKNKYARSLVQSWLETTDPAKHVFEDLGIAAFLIELWRDMYRGVDFPGFVDIGCGNGLLVHILKLEGYDGWGFDARERKSWSQYNSSFSGSPSGKSLQRRLLLPSIIPVETPDANTKVIDPKDVHDGTFPKGTFIISNHADELTPWTPILAAISQCPFISIPCCSHNLTGDRWRAPPPRDKSKPKSMFASLVDWVAQIAEDCGWDVETEMLRIPSTRNTGLVGRRNTKGAEEIDMHAVLQKYGGVQGYYSNVAKLLKSTPRGH

SEQ ID NO: 6808 - DNA, 1734 bp, Apis mellifera
  CDS (1)..(1734)
atggatttcaaaaccataataaatgatcaaaatgaaattagtgcatcgcaatttttgaaagctattgatatatggtgtcgtaatcctcaaattataaaccgtataaatcaccaaaaagatgatattgataatagaacgttattggatgctttgcgcatttttgatcaagtggctattacaacaaatatggaaaaaatccatttatatgtgacaaaacaattgccacgtacgccacatatattttctactggtattgaattttttttagtgagcaaggaaagaggttgtgtaataaatattcacaaaccctttctcgtacataaacaatctctcggtaccagaatgccatttatgttacaacaaggaacagatggttatatatccattagtgtccatcaagtgaataatattatgtccgatttcagcattgaatggttaaagaaaaaacttcttccgtgtatcctgaaatgggcgaaaagcgaatccggaacccggacaccgatttcgttatcttcattgaatttcgtatcaactgaaaaatatgcaaaattatattgcaaattgaaagaaaaatatggtataaaattgataaagaattggcctgagaatacagatccaataaaatttgtttatgaagatattgcaattgctacttatttattattgttatgggaaaaagagagattcgaaaagggaattaataatttacaatcatttcttgatttgggatgtggtaatggtttactcgtacatattttattcagtgaaggtcatcatggattaggaatcgatttacgaaaaagaaaaatatgggatttgtacccacctgaaactccattacaagtttgtaccattgttccatcttctgaaacgatatatccggaagtagattggattatagggaatcattcggatgaattaacaccgtggattcctataattgctgcacgtagttccagcaattgtcgttttttcttgttaccttgttgttcgtacgaacttaatggaacaaaatatcaaagatattgtgcctctaaaagtcaatattccgaatacattgattacgtgagaagtatatgcgttcaatgtggattcacgacgcatctcgataaattaagaatcccttccactaaacgaatatgtctgattggatgggaaagaacgtatgaaaacgttaaaaatttagaggatcgtattaaacaaatattaagtgcaaaaacaactttaactaaacaaaaatatgaatcgaataaaaaaatcggtgatacgacggaagaatggacttgtgattttaagccaagggacaaagtagaaaaagtacgaaattgtacgcagttggataaaacgttaattacgaatattgttaatatcgtatcaagtcagttacttcacgaaggttgtactatatacatcgaggaaacgcctaaaaagttttggaatgctggtagatgtcttgaactacgtgaagtcgctgaatcgattccaaaagaagttatgatgcagttgcgaaaagaatatggaggtcttcaaacgttattaaaaaatcacagccatatatttcgtgttgctcaaggaaaagtggaatttaatatacctggaatagaaagaattaatgaaaaatcgaaaaaaaaaagattatcgttgccacaaaaaaaaaccaaatcttgttggttttacgaaaatcatccgaatggttgccctgcaactgaaacaaaatgtaattacaaacattaa

SEQ ID NO: 6809 - protein, 577 aa, Apis mellifera
MDFKTIINDQNEISASQFLKAIDIWCRNPQIINRINHQKDDIDNRTLLDALRIFDQVAITTNMEKIHLYVTKQLPRTPHIFSTGIEFFLVSKERGCVINIHKPFLVHKQSLGTRMPFMLQQGTDGYISISVHQVNNIMSDFSIEWLKKKLLPCILKWAKSESGTRTPISLSSLNFVSTEKYAKLYCKLKEKYGIKLIKNWPENTDPIKFVYEDIAIATYLLLLWEKERFEKGINNLQSFLDLGCGNGLLVHILFSEGHHGLGIDLRKRKIWDLYPPETPLQVCTIVPSSETIYPEVDWIIGNHSDELTPWIPIIAARSSSNCRFFLLPCCSYELNGTKYQRYCASKSQYSEYIDYVRSICVQCGFTTHLDKLRIPSTKRICLIGWERTYENVKNLEDRIKQILSAKTTLTKQKYESNKKIGDTTEEWTCDFKPRDKVEKVRNCTQLDKTLITNIVNIVSSQLLHEGCTIYIEETPKKFWNAGRCLELREVAESIPKEVMMQLRKEYGGLQTLLKNHSHIFRVAQGKVEFNIPGIERINEKSKKKRLSLPQKKTKSCWFYENHPNGCPATETKCNYKH

SEQ ID NO: 6810 - DNA, 1986 bp, Gallus gallus
  CDS (1)..(1986)
atggggctgctgggcacggcggcggtgcggggtggcggcgaggtgctgccccgcggcttctgggcggcggtgcgcgtgtggctggagaagccgcaggtggccaacaggcggctgtgcggcgccgccatcgaggcggagggcacggtgctgcccggggaggacggagatgcgtctccccacctcgggagcggcgaggagtcggcgggggctgcggagctgggccggctctggagggaggtgcgcgaggagctgctgcctttcctcgcggccgggccaggtcgggagctccgtgctgtgctgagggcactgctgccccgggtgcggcccgcagggcctcccgctccgcctgtgaaggagctggtggtgcaagatgtttgcaatggaactgtaacctttcttcctttggaggaaaacagtgaaggaaaataccaaattaaaaagtgcaatatttatcaaattcaacttacacacataggagatgaagaatggtctgtgtctattatagctccatcttcagaagattggttttcagatggaataacataccccaaactgtcatggcttggagatgtacttttgtccaaactggctaagtggtctgtggagcaaaagtgcagtgagttcagaagtacgctgtcactcattcctgtagcaaaatacagcaagatttatcaagaccttaaagaaaaatacaaggaaatggtaaaggtatggcctgaagtgacagatcctgagaagtttgtttatgaagatgttgccattgccacttacttgctggttctctgggaagaagagagaaaggaaaaaggattggccaacaaacagtcgtttgtagatcttggatgtggaaatggcctactggttcatattcttagcaacgaagggcacttaggtcgaggaattgacgtgaggagaagaaaaatatgggacatgtatggaccagaaactcatttagaggaatcttctatcgtgccaggtgacagccatctctttccagatactgactggctgataggaaaccattcagatgaattaacaccatggatacctgtaattgctgccaggtcttcctattcatgtaggtactttgtgctgccatgttgcttctttgatttccatggaaaatacagccgaagacaaagcaagaagactcagtacagagaatatcttgattttgttgctgaagtgggatgtgtatgtggttttaatgtggaagaagactgccttagaattccatcaacaaaaagggtgtgccttattggaaaaaacaggacctatccacctatggaacgttctttgattgatgagcagataacacagtttattcataatcgccagacctgtgctgtggttgcacgtgacagagaagatggatttaatcataacagtcactctgatttgtgcaaaggagtaagctcagaacttcctgaaaatatgatggagatggctagtggaatttggatgcctggatttcaacccagagaaaaagtagaacaaacaagaaattgtgctgccctccctcgggattttgtagatggtgtcgttctgaatgtggcaaacttgctgttaaatgcagtccctgcaaaatcatgttctaatagtcatggtggaaatgaggatacctggaatccaggagaaagcctttccttgaaagaagtagcagaacatttaaataaggagactttaaagaggctgaaaagtgaatatggaggcctgcaaacactgctcaagaacaatcatcaagtatttgaagttctggatgggagagttcatattcgtgactggagaaaagagaaaccatcaaggaaaacgaagcctgaagtaaaaagatgcctttcagctgaagcgtttaaaacacgtctctgttggttcttcattcatcatcctgacggttgttctttgccttctgagtcttgtccatatgctcatgggcctgaggagctaagacagtctgagactattaaaaagaaaaaacatatatggtga

SEQ ID NO: 6811 - protein, 661 aa, Gallus gallus
MGLLGTAAVRGGGEVLPRGFWAAVRVWLEKPQVANRRLCGAAIEAEGTVLPGEDGDASPHLGSGEESAGAAELGRLWREVREELLPFLAAGPGRELRAVLRALLPRVRPAGPPAPPVKELVVQDVCNGTVTFLPLEENSEGKYQIKKCNIYQIQLTHIGDEEWSVSIIAPSSEDWFSDGITYPKLSWLGDVLLSKLAKWSVEQKCSEFRSTLSLIPVAKYSKIYQDLKEKYKEMVKVWPEVTDPEKFVYEDVAIATYLLVLWEEERKEKGLANKQSFVDLGCGNGLLVHILSNEGHLGRGIDVRRRKIWDMYGPETHLEESSIVPGDSHLFPDTDWLIGNHSDELTPWIPVIAARSSYSCRYFVLPCCFFDFHGKYSRRQSKKTQYREYLDFVAEVGCVCGFNVEEDCLRIPSTKRVCLIGKNRTYPPMERSLIDEQITQFIHNRQTCAVVARDREDGFNHNSHSDLCKGVSSELPENMMEMASGIWMPGFQPREKVEQTRNCAALPRDFVDGVVLNVANLLLNAVPAKSCSNSHGGNEDTWNPGESLSLKEVAEHLNKETLKRLKSEYGGLQTLLKNNHQVFEVLDGRVHIRDWRKEKPSRKTKPEVKRCLSAEAFKTRLCWFFIHHPDGCSLPSESCPYAHGPEELRQSETIKKKKHIW

SEQ ID NO: 6812 - DNA, 1695 bp, Candida glabrata CBS138
  CDS (1)..(1695)
atgactgagaagaagactgccccaagctttcagtttatgaaggatgagagcaccagtgtgctgggtggtgaatgggtgccaatgtactgcaccgatgaaccagttgaattcagcaaaggtgattttgagaccgccatgctaaacgttatcagagagcccaatatcaactctactgcaattctaagagcagacatcctggctgaaaaattctatgacctagaaggaaatgagcaagagttgagtactgacgataagcctgttttgagtgagagtttgccatacgatgccgacgcaaagcttgttaatatcgatgatataactacaaggaaagaacttatagaaaacaaagaactagaattgacaattgtgaaagaatttgtgagaagaatgataccgagaaatccttacaaagatgccttgattaaccaaacatgcctagtatacaactccaaaaagacagagaataaggatacttcacttgtgctatacattccacattttgaagatgaagcagattgtccattctatatacctcatgttcaaaaagtggcaatccttctgcatggcggtatactatcggtgcattacataccatacgccggccagagtgaagacttgaggaaggataatgaaagagttgtaaggacagcttttagattattacaaactgcatataagcactctaaaggtgtaatgcaaggatacgagaaaagggttaatcatgatcaagtagtagatagagtgctatttcaagatacgtacatccaactgaagaagaaatactccaagtttctggtagataactgggctgagtctacggaccccaagaagcatgtatttgaagatctagcaattgctgcgtttctgttggaattctggaaaactcaatatggtgatgattacaaaactactatgcaatttagggacatgggttgtggtaacggtgttcttacctacatcctgataagtgaaggtgtaaatggtgttggtattgacgcccgcaagcgtaagtcttggagtatctatccaacagagatacaaaggcacttaaaagaacaggttattataccctccatactattgagaccaacaccagatgtaagaaggtatatgccatacctggaagacaacggtgctatgttccctatcaaagtagaagatggactaatagcaccagctactttggtttattcgagtgcggatttgattgcatcaccaaatgtgaacatttgtgaattcccagataatacattcattattggtaaccactctgatgaactaacatgctggatacctcttttgggctttccatttatggtcataccatgctgctcacatgatctgtctggtaagaaagttaggttcaacacaagggtacctaaatcggagaaaacaacacctgctatgaagaataacataaagataaattcgaataacgtgaataacagcaacagtacatatgctggtttggtgaatcatgtcgaatatttggcaaaaaaggtcggttggaaagtagagaaggaaatgctacggataccaagtacaaggaatgccgcaattattggtacagacaatgcttatgcaaaggaatttccgacccctgatatttacaggactattgaggaagaggggggagctttaacctgggttcaaaatacaatgcaattagcgaaagcatctccaagaaaccattga

SEQ ID NO: 6813 - protein, 564 aa, Candida glabrata CBS138
MTEKKTAPSFQFMKDESTSVLGGEWVPMYCTDEPVEFSKGDFETAMLNVIREPNINSTAILRADILAEKFYDLEGNEQELSTDDKPVLSESLPYDADAKLVNIDDITTRKELIENKELELTIVKEFVRRMIPRNPYKDALINQTCLVYNSKKTENKDTSLVLYIPHFEDEADCPFYIPHVQKVAILLHGGILSVHYIPYAGQSEDLRKDNERVVRTAFRLLQTAYKHSKGVMQGYEKRVNHDQVVDRVLFQDTYIQLKKKYSKFLVDNWAESTDPKKHVFEDLAIAAFLLEFWKTQYGDDYKTTMQFRDMGCGNGVLTYILISEGVNGVGIDARKRKSWSIYPTEIQRHLKEQVIIPSILLRPTPDVRRYMPYLEDNGAMFPIKVEDGLIAPATLVYSSADLIASPNVNICEFPDNTFIIGNHSDELTCWIPLLGFPFMVIPCCSHDLSGKKVRFNTRVPKSEKTTPAMKNNIKINSNNVNNSNSTYAGLVNHVEYLAKKVGWKVEKEMLRIPSTRNAAIIGTDNAYAKEFPTPDIYRTIEEEGGALTWVQNTMQLAKASPRNH

SEQ ID NO: 6814 - DNA, 1614 bp, Kluyveromyces lactis NRRL Y-1140
  CDS (1)..(1614)
atgacctcgaatacgcttcattataccgtggagaaatccagtattttgggaccagaatggcaatctttatattcgacagcggaacctgtcgacttcgataaatcacatttcgaacaagctatgctaaatgtgataaggcagcctaatgtaaactcgactgttattctacgtgcagatatgcttatagacaatgaatacgacttagagtctggttcatgtgtgaaatcagagaagaaagacatcgcgttgggaagcgatgagggtatattgaaagtaaacatcgatgatctagcaccgagatctgtaccgatagcgttggctgatgttaccacaaagttccaatttgttaggaggattgttccgaggaatccattcaaggatgctatcattaatcagacgtgtttggttatgaattccaactcagatgcttcaacctctttagtaatttacatcccacattttgataatgctgagttatgtccgttttatatcccacaagtggctgcagtagggattctattgcatgatcaccagctatcggtgcattatatccctttcgcagggcaaaaagagcttcttttcgatccaaaacaacgggtggtaagaactgctttcaggttattacaaacagcatacaagcattcgaaaggtgtcaaagatgggtatgcgaaacgggtaatgcatgacgttgtcgtggataaagtgttgttccaggaccagtatatccatttgaagaagaaatactcaaagttcttggtggataactgggcggaaagtactgatccaaagaaacatgtctttgaagatatcgccattgcagctttcttgatagaactgtggaagaaaatatatggtgcagagaatacaacgaataagatgcaattcagagacttagggtgcggtaatggtgtgctttgttacattttgattcaagaaggcttcaaagggttggggatcgatgcaagacaaagaaaatcttggtcaatataccctgctgaagtgaaaagatgtttgaaggaacaagtcatcattccttctgtgttgctaagacctcatccaacgatgaaactacatgccccacatcttcaacacaacggtagatttttcccgatgcaacttgtgtcacctcaattaattgcgcctgccaccgtaatgtactcatctgcagatttacttcaatctcctcaggttaacatagcagaattcccaccggataccttcatcataggtaaccatagcgatgaactaacctgctggattcccttgctaggctacccattcatggtgattccatgctgttcccataacctaagtgggaatagaataagatatgctgtgcgcgacgttgagagagcgaagaaacttggaaatagtacctatcagggtctcgtggatagggtagaatatctagcagacagagttgggtggaaaactgaaaaggagatgctacgtattccaagtacaagaaatgcagctatcattggttacaagaacgataagctcaacgaatttcctacagatgaaatatactcgattttaatggaagaaggtggtgcggacggatgggttgctaataccatgaacctaatgaaaagtaatccacgaggccactaa

SEQ ID NO: 6815 - protein, 537 aa, Kluyveromyces lactis NRRL Y-1140
MTSNTLHYTVEKSSILGPEWQSLYSTAEPVDFDKSHFEQAMLNVIRQPNVNSTVILRADMLIDNEYDLESGSCVKSEKKDIALGSDEGILKVNIDDLAPRSVPIALADVTTKFQFVRRIVPRNPFKDAIINQTCLVMNSNSDASTSLVIYIPHFDNAELCPFYIPQVAAVGILLHDHQLSVHYIPFAGQKELLFDPKQRVVRTAFRLLQTAYKHSKGVKDGYAKRVMHDVVVDKVLFQDQYIHLKKKYSKFLVDNWAESTDPKKHVFEDIAIAAFLIELWKKIYGAENTTNKMQFRDLGCGNGVLCYILIQEGFKGLGIDARQRKSWSIYPAEVKRCLKEQVIIPSVLLRPHPTMKLHAPHLQHNGRFFPMQLVSPQLIAPATVMYSSADLLQSPQVNIAEFPPDTFIIGNHSDELTCWIPLLGYPFMVIPCCSHNLSGNRIRYAVRDVERAKKLGNSTYQGLVDRVEYLADRVGWKTEKEMLRIPSTRNAAIIGYKNDKLNEFPTDEIYSILMEEGGADGWVANTMNLMKSNPRGH

SEQ ID NO: 6816 - DNA, 1785 bp, Debaryomyces hansenii CBS767
  CDS (1)..(1785)
atggttaaacatacaaagtcaaaaaatgattttgatgctgagttgttactctctgagacttcaaagataggtgacccatgggtacctatttatcaaactgcagttgatattgaagctcatcacttcgaaactgcgatgtcaaacttgataaaacaacctaacataaattcgactgtaatcatgagggcagatatattgaaagaaaatgtgtttgacgttgaaaatggagattctacctttgtcagtaaattaataaataaggtacctgaatttccatcagaaaatcccgatgacgttatactacatagataccttgatgatatcgacttgagaacaatttcattgaataatagtgaattaaaattgaacactaaatgtgaagtagtcaggcgaatcatacctagaaacccgttcaaagatcacataataaaccagacttgcttggttttatctagctcaaatgccgatcccgagagtcatacagaaaaagaatcagatgattctgttctagtggtatacattccccatatacaatcaagtgacgagattcctttttatttacctcctgtctatggcgtggggatactatatcataaatcaactttatctattcaatatttaccattcaattaccagaattataaaacgtcgcctgagatacaattgtctttaagaaatttggatgtaactgaaaggccaataagaatcgctcttagattattacaaacatctagtaaacattcccttggggcaaaatctgggtatgaaaaaagggtgaatcatgatttagttgtaccaaaaatagcattccaaaatagatatataactttgaagaaaaagtattcctctaatttagtgaatctgtggtgtgaaagtactgatcctaaaaagcatgtctttgaagaccttgcgattgctgcatttttaattgagctttggacagtaaaatataagtctagggaagatttcgaatttagagacttaggttgtggtaatgggttattagtatacattttgaacatggaaggctatagtggtaaaggaatagatgctcgttcaagaaaatcctggagtacctatccagaaaacgttcaaaataacttgtcggaacagattatcattccaagcgtattattaaaaccacatcctgcattgtcgaggttaatccctaatgtcaccgataactttagatattttcaagcacctcagcttccttccaagaacaattgcagctgcgaagccgagaacgtccctgctgacgacaaatctacaagtcatactaattcgagctccacattaacgacatattcctctgccaatttattagaatcatctcaagtttgtacaacagaagaatttccaccaaatacatttataatcggaaatcattcagatgaattaacatgctggataccgttgttgggttatccattcatggtaataccatgttgttcacatgcattatcaggcgcaaaggttagatattcaccacggaaacaacagaaatcaaaccaacaacaaaatgtatcgacatatggcgccttagtagaccatactgaggacttggcgaagcagatgggttggatagtcgaaaaggaaatgctcaggatcccaagtacaagaaatgctgcgattattgcaactaaaagacaacctcattgtatcgacgaaaacgatgaggtaactcaaactagagtccttgatattttggctttagaaggtggggcagaaggatgggtcgagaactctataaacttgatgaaaaaggcacctagaaatcactag

SEQ ID NO: 6817 - protein, 594 aa, Debaryomyces hansenii CBS767
MVKHTKSKNDFDAELLLSETSKIGDPWVPIYQTAVDIEAHHFETAMSNLIKQPNINSTVIMRADILKENVFDVENGDSTFVSKLINKVPEFPSENPDDVILHRYLDDIDLRTISLNNSELKLNTKCEVVRRIIPRNPFKDHIINQTCLVLSSSNADPESHTEKESDDSVLVVYIPHIQSSDEIPFYLPPVYGVGILYHKSTLSIQYLPFNYQNYKTSPEIQLSLRNLDVTERPIRIALRLLQTSSKHSLGAKSGYEKRVNHDLVVPKIAFQNRYITLKKKYSSNLVNLWCESTDPKKHVFEDLAIAAFLIELWTVKYKSREDFEFRDLGCGNGLLVYILNMEGYSGKGIDARSRKSWSTYPENVQNNLSEQIIIPSVLLKPHPALSRLIPNVTDNFRYFQAPQLPSKNNCSCEAENVPADDKSTSHTNSSSTLTTYSSANLLESSQVCTTEEFPPNTFIIGNHSDELTCWIPLLGYPFMVIPCCSHALSGAKVRYSPRKQQKSNQQQNVSTYGALVDHTEDLAKQMGWIVEKEMLRIPSTRNAAIIATKRQPHCIDENDEVTQTRVLDILALEGGAEGWVENSINLMKKAPRNH

SEQ ID NO: 6818 - DNA, 1590 bp, Yarrowia lipolytica CLIB99
  CDS (1)..(1590)
atgttcacacccaccgatatcagcggcgagccgtccgcggtcggcacacaatggacgccgtatctgtcgcacccggtcgactttggggcccagcactttctcgaggccatgctcaacgtgatcagccagcccaacatcaactcgtcggtgatcatgagagccgatatcatttctgactcgctcaacatgatgccgaacatcatgggcacggacaaggccaatgaagggttcattttcgatacccatgaaggacctgtcgacgacgacaagaaggatacagacaaggacaagaacactccagttcctccgaatctgcaggattacgagccccgacaagtcgaggtgactccctgtccagtcaaacgagtcattgttcgtcgaatcatcccccgaaacccccagaacgacttttccgtcaaccaaacatgcatcgtccactcggacaagccgttgtgggactctgacggcaaagaaacgtccgagggcgccaaaatcgccatttcctacatttcgcaccacgaccatcccaagtcgtgtccctactacctgccctgtgtcaaggccgtattgctgtactttgacggaagtgccatctccgtctactacgaaaagtataccgactacgagctctcggccgagcaggaggaacgatgcggtcgaattgccctgcatcttctccacactgtgttccgccactcgtcgggtcaaaaggcaggctacaagaaacgggtgcatcacgacatgatcatcgaccgaatcaagttccaggacagatacatctacctgaagcaaaagtacgcacattcgctggtgtcctcatgggtcgagtccacagaccctcgcaaacacgtgtttgaagatcttgccatcgccgcctttctcatcgagctgtggggccagatgtacaagaacaaggacgatatttatttctatgatctgggctgcggcaacggcctgctggtcaacattctaatcaaggaaggctacgtgggcgagggagtcgacgcgcgcgcacgcaaatcctggcagacctacgagcccgaggtgacccagaagctgctggagaaaatcgtggtccccacggttcttctggaccaaatggtgggccaggcccaatacctgccccctcacgctgctgagaagcgactcgcagaagccaacggtctggccacggatcccagagtgttccagactgctgggctgcccgaaaacgcatttctcatcggaaaccactcagacgaactcacctgctggattccgctcatggaccgtcccttcatggtcattccctgctgctcccacgcgttgtcgggcgagaaaaaacggttcccgcccacctcgtcggatcccgaggagaagtcaacgtaccggtcgctcgtgggtcacgtggaacagctgtcgtcgaaaatcggctggcaggtagagaaggagtatctgcgaatcccgtccactcgaaacgccgcagtcattggccgaacccgcgtcgagccccagatgaacatctttgagattctgtactcggagggaggaggagagggctgggtcgagagagcacgagatctctgtgcaaaatccccgaggaaccactag

SEQ ID NO: 6819 - protein, 529 aa, Yarrowia lipolytica CLIB99
MFTPTDISGEPSAVGTQWTPYLSHPVDFGAQHFLEAMLNVISQPNINSSVIMRADIISDSLNMMPNIMGTDKANEGFIFDTHEGPVDDDKKDTDKDKNTPVPPNLQDYEPRQVEVTPCPVKRVIVRRIIPRNPQNDFSVNQTCIVHSDKPLWDSDGKETSEGAKIAISYISHHDHPKSCPYYLPCVKAVLLYFDGSAISVYYEKYTDYELSAEQEERCGRIALHLLHTVFRHSSGQKAGYKKRVHHDMIIDRIKFQDRYIYLKQKYAHSLVSSWVESTDPRKHVFEDLAIAAFLIELWGQMYKNKDDIYFYDLGCGNGLLVNILIKEGYVGEGVDARARKSWQTYEPEVTQKLLEKIVVPTVLLDQMVGQAQYLPPHAAEKRLAEANGLATDPRVFQTAGLPENAFLIGNHSDELTCWIPLMDRPFMVIPCCSHALSGEKKRFPPTSSDPEEKSTYRSLVGHVEQLSSKIGWQVEKEYLRIPSTRNAAVIGRTRVEPQMNIFEILYSEGGGEGWVERARDLCAKSPRNH

SEQ ID NO: 6820 - DNA, 2124 bp, Canis familiaris
  CDS (1)..(2124)
atggcggaggtgggccgcgcggccgtgcgggacccgggtgcgctgctccccgggggcttctgggcggcggtggccgtgtggctggagaggccgcaggtggccaacaagcggctgtgtggcgtccgcctggaggcccggcggagtgttgctgagccccgggcggaggactgcggccagcggcccaacgccggccgggagcaggaggagcgggccgcggccgccccgggtctgcgccccccggatgggccccgcgagccggcggtcggggacgccggtttcccggcctcggatctggagtccgcctgggacgcttgctttcgaagccaagccggcggcggcccggaggtgctggccttcctcgccgggcccccggtgggaccgcagccaggggcgccccgccagctggacctcgttctcagaagcgtcatcccgaagacgggcccgcgctgcccgcttgccgttccgaggagggaaatggtcgtgcgagatgtcctcaatggaacagtaacatttttacctttggaagaagacgacagagggaatttaaaggttgagacaagcaacgtgtatcaaatccggctcagtcagagcagagaagaatggtttatatctattttaattttctgtccagaaagatggcattcagatggcattgtttatcccagacccagctggctgggagaagagctgctggccaggctggccaggtggtctgtggacagcaagaagagcgaatttaaaagcaccctgtccctcatttccatcatcaaatacagcaagacttaccagatgctcaaggagaagtataaagacatggtcaaggtatggcctgaagtaactgatccggaaaagtttgtgtacgaagatgtggctcttgctgcctacctgctggttttgtgggaagaggagcgagaggagcggggcttgacagccaagcagtcctttgttgacttaggatgtggtaacggtctcctggtccacatcctgagcactgaggggcatccaggcagagggattgatgtacgaagaagaaaaatctgggacatgtatggaccacagacttgcttagaggaagatgcaattacaccaaatgataagaccttgttccctgacgttgattggttaattggtaaccattccgatgaattgacaccatggatacctgtcattgcagccaggtcttcctacggctgccgcttctttgtcctcccctgctgcttctttgacttcattggaaaatactcccggaggcagagcaggaagactcagtaccgggagtaccttgatttcatcacagaagtggggctggcctgcgggtttcacgttgaggaggactgccttcgcattccctccaccaaaagggtttgtctcattgggaaatccagaacatactcacctgctagagaagtttccatggataagcagagaacccggtatattaacagcaggcggggccaccttgccagcccacccggcgagacgcctgcctctcttccaccccgggctgctgtgggacatgagggtcaccccaacgggcaccaggccctggacgttggggctgccgagggaggggcagaggccccggctgatgaactctggctgtctggatttcaacctagagaaaaagttgagcacctgaggaactgtgccaccctccctcgagattttattgaccaagtggtcttgcaagtggcacatttgctgttggacagagaggagcagataagcataggagatgcttccagcagcagctcgaaggcctggaaccgaggaggaagcctctccttgacagaagtggccagtgagctggacccagagacactgcagaggttgaagcgggagtgtggaggcctacagacactgctcagaaacaaccatcaggtgtttgaagttctgaatgggcgagttcacattcgtgactggagagaagagcagctacagaggcagcagcacccggaagcaaagcggagactgttctcagaagctttcaaaacccgcatctgctggtttttcagtcaccaccctgacggttgtgttctgccttcagacagctgcccgtttgcccatgggcctgcggagcttcggcctccccggacccccaagaagaagaagcagattctgtga

SEQ ID NO: 6821 - protein, 707 aa, Canis familiaris
MAEVGRAAVRDPGALLPGGFWAAVAVWLERPQVANKRLCGVRLEARRSVAEPRAEDCGQRPNAGREQEERAAAAPGLRPPDGPREPAVGDAGFPASDLESAWDACFRSQAGGGPEVLAFLAGPPVGPQPGAPRQLDLVLRSVIPKTGPRCPLAVPRREMVVRDVLNGTVTFLPLEEDDRGNLKVETSNVYQIRLSQSREEWFISILIFCPERWHSDGIVYPRPSWLGEELLARLARWSVDSKKSEFKSTLSLISIIKYSKTYQMLKEKYKDMVKVWPEVTDPEKFVYEDVALAAYLLVLWEEEREERGLTAKQSFVDLGCGNGLLVHILSTEGHPGRGIDVRRRKIWDMYGPQTCLEEDAITPNDKTLFPDVDWLIGNHSDELTPWIPVIAARSSYGCRFFVLPCCFFDFIGKYSRRQSRKTQYREYLDFITEVGLACGFHVEEDCLRIPSTKRVCLIGKSRTYSPAREVSMDKQRTRYINSRRGHLASPPGETPASLPPRAAVGHEGHPNGHQALDVGAAEGGAEAPADELWLSGFQPREKVEHLRNCATLPRDFIDQVVLQVAHLLLDREEQISIGDASSSSSKAWNRGGSLSLTEVASELDPETLQRLKRECGGLQTLLRNNHQVFEVLNGRVHIRDWREEQLQRQQHPEAKRRLFSEAFKTRICWFFSHHPDGCVLPSDSCPFAHGPAELRPPRTPKKKKQIL

SEQ ID NO: 6822 - DNA, 1911 bp, Dictyostelium discoideum
  CDS (1)..(1911)
atgaacgaaactaattacattgaggaaaatgaaattttaattaaacttggaaaatgggaagatgtttattcattaccaactagaatgacattagaatcattttggtatacaatggagaaatggtcattaaatccacaatgtatgaataaaagtgcaaagaaatttagtttaacaaataaatcaacctatgataaaaacaatcaacaattatcaaattatatttttaaaaagaatttatctggtatatttttaaatgaaaatgaagaaaaagaaaaagaaaattatgaaaaagaagaaaaagaaaaagaaaaagaagatgaaaatgatgaaaatgaaaataaattaaaaaaacaaaaacataaacatcatggttgtgaaaatgatgaagatgaagatgaaaatgaaaatatatttaaacaagatggtagtattgaaaaggatataaatacaaaggatataaatgaaagtgaattagcaattgaatatttagatgataaagttgaaacaatcatttataaaagacatttaataccaagattattgaatagagatccatcaattgatgaattagtgtatcatcgtaaatcaagcaatcaatgtcaattcataccaatgttaaatgttattgataatgcaagattactaccattcttttatccaaaagtattaggatttaatataatctatcaacaattagattcaattaaagataaagatttaattaatcaattattagaaaaagaaataaatgatgaaattgagaaacaaaaaaaacaaaaacaaaaacaaaaaaaaaataaatcaaacccaaacaaagaaaaaaaaaaagaagaacaacaagaagaagaaattattaattttaaaggaattttaaaaattcaagtaatttattttaaagaatttcaaccaaaattcgataaaacatcaaaacaaattttagagaaattaaatcgttggggtgtcaattatgagattggttataaaaagaaagcaaatcttgatcaaattgtaccaaagaatgtatttttatcaatgtatgaagagatgaaacaacgttataaaactatggaagagggttggaaagaggtgacacaaactgatccacagaaattcatttatgaggatgttgcaatcgctgcttatttaatttgtatttggagaaaagagaatcaagaaaatggtaaatcaccaaataaaccaactcaaagattcattgatataggttgtggcaatgggttattggttcatattttaaataaagaaggttatgatggaattggtattgatttacgttcaagaaagatttgggcaaaatacgatgaccaagttcaaaagaatttaattgaagaagcaatcttaccaaaagatacaacttttgaacaatatgattggatcattggtaatcattccgatgagctaacaccatgggtaccttatataacttcgaaattaccaaatcaaagattctttttattaccatgttgtttctataattttaattctcgttttaaagagaatgatactcgtattggtaaatattcttgttatttaaattatattgaaaaggtttcaaatgaatgtggtttcaatgtcattaaagaaactcttagaattccatcaactaaaaatatagctttcatctcttcattacgtgatccaactttaaccgatgaccaattaattgaacgtcgtcaaaaattattaaaatcttcaaattatattgattttaaaccaagagaaagagatattaaatgggtacctcaaaagaaatatcaacctggtcaatataatccacatttagatccattaaatccaaataatattaaaagaattattagaaaagaaaataaagataaagaaaataaagataaagaaaataaagataaagaaaataaacaagaagaagtttaa

SEQ ID NO: 6823 - protein, 636 aa, Dictyostelium discoideum
MNETNYIEENEILIKLGKWEDVYSLPTRMTLESFWYTMEKWSLNPQCMNKSAKKFSLTNKSTYDKNNQQLSNYIFKKNLSGIFLNENEEKEKENYEKEEKEKEKEDENDENENKLKKQKHKHHGCENDEDEDENENIFKQDGSIEKDINTKDINESELAIEYLDDKVETIIYKRHLIPRLLNRDPSIDELVYHRKSSNQCQFIPMLNVIDNARLLPFFYPKVLGFNIIYQQLDSIKDKDLINQLLEKEINDEIEKQKKQKQKQKKNKSNPNKEKKKEEQQEEEIINFKGILKIQVIYFKEFQPKFDKTSKQILEKLNRWGVNYEIGYKKKANLDQIVPKNVFLSMYEEMKQRYKTMEEGWKEVTQTDPQKFIYEDVAIAAYLICIWRKENQENGKSPNKPTQRFIDIGCGNGLLVHILNKEGYDGIGIDLRSRKIWAKYDDQVQKNLIEEAILPKDTTFEQYDWIIGNHSDELTPWVPYITSKLPNQRFFLLPCCFYNFNSRFKENDTRIGKYSCYLNYIEKVSNECGFNVIKETLRIPSTKNIAFISSLRDPTLTDDQLIERRQKLLKSSNYIDFKPRERDIKWVPQKKYQPGQYNPHLDPLNPNNIKRIIRKENKDKENKDKENKDKENKQEEV

SEQ ID NO: 6824 - DNA, 1821 bp, Aspergillus nidulans FGSC A4
  CDS (1)..(1821)
atggctagagcgcttgccctgtcacgatctgttcaagtctgtaaatcgagattgttcaccgttgcttcaaaatcagcaattactaagcgctgtctcagcaaccccatccaatatcgatctgtatcattatttgcaaccacctacgcaccctccaaagacttgaactccagactccactcagaacacatcggtgacacagcgctctacctccttctcaacccgggcttgacctctagtgtactatttcgcgcggatattctggcgcagagcggaaaatgtcctacccttgctgctcttgaggcgcagaagcagcaagagacggaggaggcgtctacggctacggctatgactatggctcagaatgttattgaagaggaaaaggaggttaaggagcccgtggtggaaatccctgcgcgcgaagtaccggggttcgagctgcacaagacgcttatcaggcggctgattccgcgaaaccaacagctggatatgccggttgatcagacgtgccatttatattcgcacgcgggcgctgtggagcagatagagaaagagaaagagctggggataccccattcgagagcgcccaaggaacggttcatggtgatttatacgcctcatgtttcgtccaaagaggagctgccatattaccatccactcgtccgatcgatggcatttgtgtatgaatttggctataccggcgaattcgaaggaccagagaactcaataccgagaatagcagagaatccgaagggcacaatgtccatacacttcctcccttacgaaaacgatgtggattcgatttctgctcggctggaacggtcgctcacgaaactcattgaagtccaaatccgcactacgaagggcaggctcgatccctgtagaccgagcacatcatcgccctatgcgctgattaaagataatgtgattccgcgaaatcgcgtgcaggatacatactcccgcctgaagaataagtacgcagcgaacttgaacgagcgttggatcgagagcacggaaccaagcaaacatgtctttgaggatttgagcattgcggcgttcttaatagagttgtggcgggatctgtatggggctgtacctggtgatgaacgagagcaacagaagcagcaatcctcaacgtcaaaggtgggctcagggcagttcccaggcttcgttgacatcgcgtgtggaaacggtgtacttgtctatatcctcattagcgagggatattctggttggggctttgatgcgcgccgcaggaagacatggagtatttttcctactgatgtacaggaacggttgaaggaggaaatttatatcccgaagccctttatggatgtccttgctgcgcaaaaccaaggtccaatccagaacaagaaccaggatgcttcgatgcaatcaccactctcagaacctcagtccgggcagagcaatggccctaattctggcaccagcaccagtacctccctttccaacctccctaaagataccttcattatctcaaaccacgccgacgaacttactctctggacacccatcctatcaaccctcctcaaccccgcaaaccctcccccctttctggctattccctgctgctcacattccctttctggggcgcgacaccggttccggccccagtcagctaggccctcagctactcaaaaccctcaaaaacaacaaggcgaaaacgggactcattcacaggatgaagagggtagctcagaggacatgaaagaacgaaagggcgaagaaaaggaaaagaatccagaaacaggtgaccttgagcaaatgcggaaggataaactcgctgcccaaaaccctcactaa

SEQ ID NO: 6825 - protein, 606 aa, Aspergillus nidulans FGSC A4
MARALALSRSVQVCKSRLFTVASKSAITKRCLSNPIQYRSVSLFATTYAPSKDLNSRLHSEHIGDTALYLLLNPGLTSSVLFRADILAQSGKCPTLAALEAQKQQETEEASTATAMTMAQNVIEEEKEVKEPVVEIPAREVPGFELHKTLIRRLIPRNQQLDMPVDQTCHLYSHAGAVEQIEKEKELGIPHSRAPKERFMVIYTPHVSSKEELPYYHPLVRSMAFVYEFGYTGEFEGPENSIPRIAENPKGTMSIHFLPYENDVDSISARLERSLTKLIEVQIRTTKGRLDPCRPSTSSPYALIKDNVIPRNRVQDTYSRLKNKYAANLNERWIESTEPSKHVFEDLSIAAFLIELWRDLYGAVPGDEREQQKQQSSTSKVGSGQFPGFVDIACGNGVLVYILISEGYSGWGFDARRRKTWSIFPTDVQERLKEEIYIPKPFMDVLAAQNQGPIQNKNQDASMQSPLSEPQSGQSNGPNSGTSTSTSLSNLPKDTFIISNHADELTLWTPILSTLLNPANPPPFLAIPCCSHSLSGARHRFRPQSARPSATQNPQKQQGENGTHSQDEEGSSEDMKERKGEEKEKNPETGDLEQMRKDKLAAQNPH

SEQ ID NO: 6826 - DNA, 1176 bp, Candida albicans SC5314
  CDS (1)..(1176): transl_table=12
atggagcattcagataaaaattttctaacggcgaatgtctcaaagctagggccatgttgggttcctatatatgaaagcccagttggatttaacgtacaacattttgaagcagccatgttgaatatcatccatcagcccaatattaactcaaccgttattatgagagcagatattttgcgagaaaatgtgtttgatccagatgaaggtgatacaacattcaccagtaaaatcgcaaacgaaatcccggagtttcaaactgatgatgattcaaagttgttgttgagagatttgaaagatatcaaagtgaggcagataccagatgtaccagacattcagtttaccaaaaggcatgaaattgtcagaagagtaattccacgaaacccctttaaagattacataataaatcagacatgtcttatgttgactgacaacaaaaagaatagcttggtggtttacatccctcacatagattctgtggaagaaacaccatactatttgccaccagtttatggaattgggatactctacaatgattttaaggtttctgtccattacttgccttttggttttgaaacacccaacggtaaggagtttactttattaaaatccatgacagaacaggacagaccaatcagaatagcattaagattattgagcacggccactaaacattctcagggtaggaaggcaggttatgaaaaaagagtaaatcatgatctagtggtaccccaaaccaatttccaaaaccaatatatcacattgaaaaagaaatacctggattatttcatgaacaattggggcgagtctactgatccaaggaagcatgtatttgaagatatcgccattgctgcattcataatagaatattggaaactaaatagttttgagccggaaaagtttgaatttcgtgatttgggttgtgggaatggtttgttagttcatatattgatactggaaggatacaaaggaaagggaattgatgcaagagcaagaaaatcttgggcattatatccgtctgaagtacagaattgtcttttggagcaaattatcgtcccccaattttacttgaccaacagccaatgccatcagatgttgccgcttcaattcaaaaacagcaaatatccactacagcagagttccctaaaaatacttttattatggcaatcattcggatga

SEQ ID NO: 6827 - protein, 391 aa, Candida albicans SC5314
MEHSDKNFLTANVSKLGPCWVPIYESPVGFNVQHFEAAMLNIIHQPNINSTVIMRADILRENVFDPDEGDTTFTSKIANEIPEFQTDDDSKLLLRDLKDIKVRQIPDVPDIQFTKRHEIVRRVIPRNPFKDYIINQTCLMLTDNKKNSLVVYIPHIDSVEETPYYLPPVYGIGILYNDFKVSVHYLPFGFETPNGKEFTLLKSMTEQDRPIRIALRLLSTATKHSQGRKAGYEKRVNHDLVVPQTNFQNQYITLKKKYSDYFMNNWGESTDPRKHVFEDIAIAAFIIEYWKLNSFEPEKFEFRDLGCGNGLLVHILISEGYKGKGIDARARKSWALYPSEVQNCLLEQIIVPQFYLTNSQCHQMLPLQFKNSKYPLQQSSLKILLLWQSFG

SEQ ID NO: 6828 - DNA, 1953 bp, Aspergillus fumigatus Af293
  CDS (1)..(1953)
atgccgaggaacgtgaagaagaacccgcgagatgtcactaagctctccgggaagcctctggctgagacgatagagccatcacctgttctgaaaaccctgcaggaggggtgggtaacctcgccagatctgatagagggtgatctctcctttactctagaggtgattcaaaacatgacggtttttctgttggcgaatcccaacctgaattcaagccacttgttccgtgcggatattctttatgatagcctgggcgttctcagcgccccgcatgctatggagcagagtcgagatcaggggagcggcggcagagaccaggatacccaaaaagaagattatgtcgagcctcttcccgcaaggagtgtacctggattcgaactgaagaggacctttgtgagaaggctcatccctaggaataggaatctggaccggcccctcgaacagacctgtcatttttacgaggcggatgaacttcccccaacatctaacagtacaaacattgctcaaagcgagcaatgcgaatcgaaggctgagtcgcctcgccaacgcttcttggtcatttacctgccgcatgtctcgtccaaggaggagatgccatggtaccaccccttgctacgatcattggcctttctgtatgattttacacccaatgcctttccacattcatccgaagagaataaaggaaccgggataatgtcggtgcacttccttccctacgaggaagaaccgatccagaaccgtctagagcgcaccctgctcgcgctgttgagtactcatatccggcttgctcgtcagacgcgcctggacgaaaagccagaaggagggaactacaacccgcacaaagataacgtgataccaaagcacctcgtgcaagacacctatgcgcgactcaaattgaagtatgcggcggacctctgtcagaattgggttgaggatactgaaccgaccaagcatgtttttgaagacctctccatcacggccttcctgatcgagttgtggaggagtatgtacggagttgtacccgccgatgagagaagccccgaccagaaggagcaaggaaagtacgacttaaagttccccgggttcgtggatgtcgcttgtggaaacggggtgcttgtctatgtgcttctctcggaagggtaccatggctggggatttgatgctcgtcgtcgaaagacctggagtatattcccgtcgtcaatccaggagagactcaaggaggaaatatacataccgaagccatttgcagacgtgtgcacagactcggagatggactttggtgtgaaaacgcacacaggcatgtttccggagcacacattcatcatctcgaatcatgccgacgagctcacagtctggacgcctcttatggctgccctctcaaacccggcatcccccttaccgttcatctcaataccctgctgctctcactcgctctccggagccagatatcgttacccgccaccgaagcctaaccaaaaagggtctgttgaccgcccagaagatcaagaggtggaacagaatcctcaaccggcagccggggacttgaaagcgctccgggctgctaaacagaaggagcgcaccgataccggcgcggccaattccatgtacggctctcttactgccaagacagtggcaaccgccgaagagatcggatacgaagtggaaaagacgctgttacgcatccccagcacaaggaatatgggggtgatcggcggccggagacggacaacgcaggagtggacctcgagggttcattccgcacaggcctcgcaggcagtcggatgtagtgctcccgaggctgttcgggctgctgcgcaggtcctagaatgggtcgcagcggttgtccagcgggagtgtgctcgagaaggaggagtcgaggtcgcagcgaaggtatggattgagcgtgccaagggactccacaagggacagggaaagggtaaccagcctgctcattga

SEQ ID NO: 6829 - protein, 650 aa, Aspergillus fumigatus Af293
MPRNVKKNPRDVTKLSGKPLAETIEPSPVLKTLQEGWVTSPDLIEGDLSFTLEVIQNMTVFLLANPNLNSSHLFRADILYDSLGVLSAPHAMEQSRDQGSGGRDQDTQKEDYVEPLPARSVPGFELKRTFVRRLIPRNRNLDRPLEQTCHFYEADELPPTSNSTNIAQSEQCESKAESPRQRFLVIYLPHVSSKEEMPWYHPLLRSLAFLYDFTPNAFPHSSEENKGTGIMSVHFLPYEEEPIQNRLERTLLALLSTHIRLARQTRLDEKPEGGNYNPHKDNVIPKHLVQDTYARLKLKYAADLCQNWVEDTEPTKHVFEDLSITAFLIELWRSMYGVVPADERSPDQKEQGKYDLKFPGFVDVACGNGVLVYVLLSEGYHGWGFDARRRKTWSIFPSSIQERLKEEIYIPKPFADVCTDSEMDFGVKTHTGMFPEHTFIISNHADELTVWTPLMAALSNPASPLPFISIPCCSHSLSGARYRYPPPKPNQKGSVDRPEDQEVEQNPQPAAGDLKALRAAKQKERTDTGAANSMYGSLTAKTVATAEEIGYEVEKTLLRIPSTRNMGVIGGRRRTTQEWTSRVHSAQASQAVGCSAPEAVRAAAQVLEWVAAVVQRECAREGGVEVAAKVWIERAKGLHKGQGKGNQPAH

SEQ ID NO: 6830 - DNA, 1686 bp, Ustilago maydis 521
  CDS (1)..(1686)
atgttcgaggttttcaacgcctacgaccatcacgaagagtctgcccgagcagggccacaaagagtgatgtcgagtttcaatggcgaatgtggtatcgagccgaacggtacagaaaacgccatcaaggcagctgaaggtgccaaacgaaccacagtgcagcatcaacaattgccacctcgaccaaaactcgtacccatttacccgtcagctcaagcacagactccaccatcttgttctaccggtatcgagggcaagttgagatcgactcttccgttcgagttctccggattatgcgcagagacatgcagtcaaggaagagagaatggcgtgtgggcctcaatcatcaccgctcccgcctacgcaccaatgcagagctggttgacagtgatgcagagcctcatacgccatcctgagcgcaactctaccaacatattgcgtgccgatattttgtccgagatcttggcttctgacaaaagaccagacgcgctcagcgaagatgcgcacgagaaagggtggaaacggcaatggacggtacgtagatcgttgctgcccagacgacccaatttggactggagcatgttacaagattgttcgctctactatcgatacaactcaacggcaaggaagacaaaagacgagccagattttcaccagcaggagaaggcggaggaggggaacggagcggaggtagaagaagcagtggtggtgtacacccctttagtcggtgatgtatcccatcccaagatggatctacccgagtcatgcaagcccacaacatcgacaacacctccagccgcagcacaagcacagataggttaccctccgcctcacgaatcctacattccattctaccatccaaaagttcgcgccctagcattccactttcacgctattgctcctcaagactctgctggagaaaccaggtttggtcaactcgggatttcgctcattcccttctcctctcctcacagcaccttggcgcctccatcgtacccaccgacacaccgactttcccgcgtaagcctatcgctcctgaccacgctgcatgtgcacacgtggggcgacctgcattcgtaccgcaaacgagtgcatcacgatcagatcgtgccgcgctcgctctaccaagatgtctacctttcactaaaagccaagtacgcgtccgaactgatagcaggatggaaagaagcgacggatccaagcaagcatgtctttgaagagatggggatcgccgcttttctcatcggattgtgggagctccactatcgaaagcaagcagatgacgaacgagagtggaagaatagtgtaaagtttgtcgatgtgggctgtgggaatggactgctaacccatatcctaatgcgggaaggattcattggagtaggactcgacatgagagaacgtaaaagctggccatcctttcgcctgcacggttcagtcttgcaggaatggacattcaacccttccaacctcgtctcttcgccctcgcccgacaagttggaaccagagatatggaagggtgcatggcttatcggcaaccacgccgatcaacttacaccctggcttcccctgcttgccacccactaccgttcggcgggattcatcaaccttccctgttgttactacgctctcgatggcacccgtgacttcccattgttactcaaagcggaagcaggcgaaaaccctacgtga

SEQ ID NO: 6831 - protein, 561 aa, Ustilago maydis 521
MFEVFNAYDHHEESARAGPQRVMSSFNGECGIEPNGTENAIKAAEGAKRTTVQHQQLPPRPKLVPIYPSAQAQTPPSCSTGIEGKLRSTLPFEFSGLCAETCSQGRENGVWASIITAPAYAPMQSWLTVMQSLIRHPERNSTNILRADILSEILASDKRPDALSEDAHEKGWKRQWTVRRSLLPRRPNLDWSMLQDCSLYYRYNSTARKTKDEPDFHQQEKAEEGNGAEVEEAVVVYTPLVGDVSHPKMDLPESCKPTTSTTPPAAAQAQIGYPPPHESYIPFYHPKVRALAFHFHAIAPQDSAGETRFGQLGISLIPFSSPHSTLAPPSYPPTHRLSRVSLSLLTTLHVHTWGDLHSYRKRVHHDQIVPRSLYQDVYLSLKAKYASELIAGWKEATDPSKHVFEEMGIAAFLIGLWELHYRKQADDEREWKNSVKFVDVGCGNGLLTHILMREGFIGVGLDMRERKSWPSFRLHGSVLQEWTFNPSNLVSSPSPDKLEPEIWKGAWLIGNHADQLTPWLPLLATHYRSAGFINLPCCYYALDGTRDFPLLLKAEAGENPT

SEQ ID NO: 6832 - DNA, 1905 bp, Strongylocentrotus purpuratus
  CDS (1)..(1905)
atgtgtgtgatttgcattaggaagctgttgccaagaagggcctcagatgctgttgtccatgaagtagggatatttgatcatgagagaaatgaagcaacctttactttgcttgaatgtggcagcaaagaagccaaattcccatcctacaaattttccttccagtgcagtagaatatctctccatgttgatgacaactacaaatctgctccatattcctcatctataccctccattgaatggctaggaaatactcttgcccccaaactcaccaaatgggcaagtgagatcgtaggatccggtcaggttgtggtggtgaaacctttggtaccgatggacaggtatactgaactctacagggagatgaaacagaagtatggcactgagtttgtcaagatttggccagagaatacagaccctcaaaagtttgtgtatgaggatgttgccatagcaacttacttgatccttctctttgaagaggagagaaaggagactggtgatgacaagaagcagtcctacgtcgacctaggatgtgggaatggtcttctggtgcacatactgaacagtgaggggtacccaggcaaaggcattgacctgcgaaggcggaagatctggagtctctacggccctgaaacccaccttgaggaaagcaccatcatcgcttccatggaaacgtctttcaaggacactgattggttgattggtaatcactctgatgagctcactccctggatccctgtcatggcagccaggtcatcgtacaagacgcgttactttgttctcccatgctgcttccatgactttgatagtaagttcggtcagagggtggggggtgagacccagtatcgcacctacctcaactttgtccgagaagcaggagagatgtgtggctttgaggttgaagaggataagatgagaataccttcaaccaaaaagatctgccatgtcggcaggagaaagacctatcctgcagaagaacattcacaagtcttggcgagaatggaggagtatgttgcttgtcgatgcagaaaatcagcgtgtcataaaagaaaatcccaccttatcgacccggtccaaaactctgaatccagtagaatctgtcctgtgtcatcgcttgagactggaaacagtgctgattcatcagagagaacaccatgtgactgtaaggatgcagaatgcgctcacagtagagaattgacaagctctgacagcggctcaactgaaggacagtgcctgaggggggagggggacaccgacaagaacttggcgcccaacttcaagccacgagcggtggaggagagggtgaagaactgttccagagttgagagatcattgaaggatcgcatcactttggaggttgcctgggcgatcctggaggatggtggggtgaggaggtcgagcacggttggagatgtagttcaaggaggcagtggcgaccatgatgacactgggaggagctcaaagatgcccaaactgtggagacgaggagctggctctttgtcttttaaacatgaaggttctataagtctgggtgatgctgcgaagctctttgatggccccacccttaagaacttgaagagcgagtgcggtggactcaaaaccctgcttaagaactacaatccagtatttgagattattaagagcaaggtctccctgaaggactggtctcagttgccttcatctgatgcaacggacccggtatcctctagcggcagttcatccaggacagcatcgcggcagttagagaagaaagacagagagagacagcaactctacaagaccaagctgtgctggtttcacgagcaccatccagacggctgcccaagaatggcaggagattgtccatttgcccatggacaagtggagctgagaagcaggccaacgtttggaaaagcacctgtgatataa

SEQ ID NO: 6833 - protein, 634 aa, Strongylocentrotus purpuratus
MCVICIRKLLPRRASDAVVHEVGIFDHERNEATFTLLECGSKEAKFPSYKFSFQCSRISLHVDDNYKSAPYSSSIPSIEWLGNTLAPKLTKWASEIVGSGQVVVVKPLVPMDRYTELYREMKQKYGTEFVKIWPENTDPQKFVYEDVAIATYLILLFEEERKETGDDKKQSYVDLGCGNGLLVHILNSEGYPGKGIDLRRRKIWSLYGPETHLEESTIIASMETSFKDTDWLIGNHSDELTPWIPVMAARSSYKTRYFVLPCCFHDFDSKFGQRVGGETQYRTYLNFVREAGEMCGFEVEEDKMRIPSTKKICHVGRRKTYPAEEHSQVLARMEEYVACRCRKSACHKRKSHLIDPVQNSESSRICPVSSLETGNSADSSERTPCDCKDAECAHSRELTSSDSGSTEGQCLRGEGDTDKNLAPNFKPRAVEERVKNCSRVERSLKDRITLEVAWAILEDGGVRRSSTVGDVVQGGSGDHDDTGRSSKMPKLWRRGAGSLSFKHEGSISLGDAAKLFDGPTLKNLKSECGGLKTLLKNYNPVFEIIKSKVSLKDWSQLPSSDATDPVSSSGSSSRTASRQLEKKDRERQQLYKTKLCWFHEHHPDGCPRMAGDCPFAHGQVELRSRPTFGKAPVI

SEQ ID NO: 6834 - DNA, 1719 bp, Caenorhabditis elegans
  CDS (1)..(1719)
atgtttcctggttcaacatggacagttattgtagaacaaatcgccgaatacgaagaggttattgatccaaaagcgttttttgataagattatcagtctttggaaggaatatccaaacgctatcagtaacagaattacaacttcagtttcagtggatacagattcagatttatggaatgaagttttaagaacatttgaaacacattacaaattttgcccgagagattgcagcgaaatagctattacgaaaatcatacacaaggatctcgctaataataaattctcagataatgcgtttgaagtttcttactatgaagaagaactccttgtacgattctacccaattactctcgatggaatgcaacacccacatttcgagagcccgtattcaattgccattaaaatcccaacagatacatccattcaacttcagtttttgaagcaagctaattcctctcaagaacattttgaatttatgaagaaacaagcattcaaacaattgtacacttggttgaaaggaattgatctttcaaaatcatctcgaaagacaaattctctactcgacaaagagtcctacatcaagacatatcgtcatattcgagaggattatggcagaggaatgatcaaaggatggacagaaaactctaatccacaaaaatcaattttcgaggattgtgggattgcttcatatataaatgagcttgtcaattctgatctcctaccaaagccgaataaattcgtggatattggatgcggaaatggtcttcttgttcatcttttgaacaaaatcggaatgtctggatacggaattgacgttcgtcatcgaaacatttggaagaccactctgaaagatgtggacctacgcgaaatgcctgtcgatcctcaaattgtcgttcaaaatgaaccgcacttcgatttagatgtggatttgctcattggaaatcacagtgacgagttaactccatggattccagttatggctgctaaactcaactgcaatttcttcttgattccatgttgcccattcaactttttcggaaagtatgccaacaacggaagccacttaggaccaaaaagaatagtttcacagtatgagtcattcttcgagtggaccgtttcagttgctgaacgacttggatttgatgttaaaattgacagattggcgattccgagcacgaaaagactttgcattatcggacgtgttccagaaggaggactatgcccaaatgtggacgaaaccatcaattcaatgactgaaggacaaaagtttattgcaagaccaaaggaaatcaaaacaacgaattgtatgaacattcctgtgactgatcgtgaaagaatcgccaagaaattatttgattttgttttgaattattctgatgcagtcagagatggatggcgttgtggaggtgaagttcctttggcccagcttgctgcgcttctcacagaagaagacaaaaaactaatgaaagatcaggacggaggacttcaaacttttcttcgaaatcaacatcaaatctttcacgtgagcactacggcaatagataagaaggtataccaagccactgctcgtcttcgtgatttccgtcagccagttgttcaaaaacgtcaatcctggaagccaaaaaaggcggaaacgatcagaaaagcaccatgctggatgtcacttcatcatccagatggttgtccagttggacaagaagcttgtcgttatgaacattaa

SEQ ID NO: 6835 - protein, 572 aa, Caenorhabditis elegans
MFPGSTWTVIVEQIAEYEEVIDPKAFFDKIISLWKEYPNAISNRITTSVSVDTDSDLWNEVLRTFETHYKFCPRDCSEIAITKIIHKDLANNKFSDNAFEVSYYEEELLVRFYPITLDGMQHPHFESPYSIAIKIPTDTSIQLQFLKQANSSQEHFEFMKKQAFKQLYTWLKGIDLSKSSRKTNSLLDKESYIKTYRHIREDYGRGMIKGWTENSNPQKSIFEDCGIASYINELVNSDLLPKPNKFVDIGCGNGLLVHLLNKIGMSGYGIDVRHRNIWKTTLKDVDLREMPVDPQIVVQNEPHFDLDVDLLIGNHSDELTPWIPVMAAKLNCNFFLIPCCPFNFFGKYANNGSHLGPKRIVSQYESFFEWTVSVAERLGFDVKIDRLAIPSTKRLCIIGRVPEGGLCPNVDETINSMTEGQKFIARPKEIKTTNCMNIPVTDRERIAKKLFDFVLNYSDAVRDGWRCGGEVPLAQLAALLTEEDKKLMKDQDGGLQTFLRNQHQIFHVSTTAIDKKVYQATARLRDFRQPVVQKRQSWKPKKAETIRKAPCWMSLHHPDGCPVGQEACRYEH

SEQ ID NO: 6836 - DNA, 1227 bp, Caenorhabditis elegans
  CDS (1)..(1227)
atgtttcctggttcaacatggacagttattgtagaacaaatcgccgaatacgaagaggttattgatccaaaagcgttttttgataagattatcagtctttggaaggaatatccaaacgctatcagtaacagaattacaacttcagtttcagtggatacagattcagatttatggaatgaagttttaagaacatttgaaacacattacaaattttgcccgagagattgcagcgaaatagctattacgaaaatcatacacaaggatctcgctaataataaattctcagataatgcgtttgaagtttcttactatgaagaagaactccttgtacgattctacccaattactctcgatggaatgcaacacccacatttcgagagcccgtattcaattgccattaaaatcccaacagatacatccattcaacttcagtttttgaagcaagctaattcctctcaagaacattttgaatttatgaagaaacaagcattcaaacaattgtacacttggttgaaaggaattgatctttcaaaatcatctcgaaagacaaattctctactcgacaaagagtcctacatcaagacatatcgtcatattcgagaggattatggcagaggaatgatcaaaggatggacagaaaactctaatccacaaaaatcaattttcgaggattgtgggattgcttcatatataaatgagcttgtcaattctgatctcctaccaaagccgaataaattcgtggatattggatgcggaaatggtcttcttgttcatcttttgaacaaaatcggaatgtctggatacggaattgacgttcgtcatcgaaacatttggaagaccactctgaaagatgtggacctacgcgaaatgcctgtcgatcctcaaattgtcgttcaaaatgaaccgcacttcgatttagatgtggatttgctcattggaaatcacagtgacgagttaactccatggattccagttatggctgctaaactcaactgcaatttcttcttgattccatgttgcccattcaactttttcggaaagtatgccaacaacggaagccacttaggaccaaaaagaatagtttcacagtatgagtcattcttcgagtggaccgtttcagttgctgaacgacttggatttgatgttaaaattgacagattggcgattccgagcacgaaaagaaaggaggactatgcccaaatgtggacgaaaccatcaattcaatga

SEQ ID NO: 6837 - protein, 408 aa, Caenorhabditis elegans
MFPGSTWTVIVEQIAEYEEVIDPKAFFDKIISLWKEYPNAISNRITTSVSVDTDSDLWNEVLRTFETHYKFCPRDCSEIAITKIIHKDLANNKFSDNAFEVSYYEEELLVRFYPITLDGMQHPHFESPYSIAIKIPTDTSIQLQFLKQANSSQEHFEFMKKQAFKQLYTWLKGIDLSKSSRKTNSLLDKESYIKTYRHIREDYGRGMIKGWTENSNPQKSIFEDCGIASYINELVNSDLLPKPNKFVDIGCGNGLLVHLLNKIGMSGYGIDVRHRNIWKTTLKDVDLREMPVDPQIVVQNEPHFDLDVDLLIGNHSDELTPWIPVMAAKLNCNFFLIPCCPFNFFGKYANNGSHLGPKRIVSQYESFFEWTVSVAERLGFDVKIDRLAIPSTKRKEDYAQMWTKPSIQ

SEQ ID NO: 6838 - DNA, 1692 bp, Caenorhabditis elegans
  CDS (1)..(1692)
atgtttcctggttcaacatggacagttattgtagaacaaatcgccgaatacgaagaggttattgatccaaaagcgttttttgataagattatcagtctttggaaggaatatccaaacgctatcagtaacagaattacaacttcagtttcagtggatacagattcagatttatggaatgaagttttaagaacatttgaaacacattacaaattttgcccgagagattgcagcgaaatagctattacgaaaatcatacacaaggatctcgctaataataaattctcagataatgcgtttgaagtttcttactatgaagaagaactccttgtacgattctacccaattactctcgatggaatgcaacacccacatttcgagagcccgtattcaattgccattaaaatcccaacagatacatccattcaacttcagtttttgaagcaagctaattcctctcaagaacattttgaatttatgaagaaacaagcattcaaacaattgtacacttggttgaaaggaattgatctttcaaaatcatctcgaaagacaaattctctactcgacaaagagtcctacatcaagacatatcgtcatattcgagaggattatggcagaggaatgatcaaaggatggacagaaaactctaatccacaaaaatcaattttcgaggattgtgggattgcttcatatataaatgagcttgtcaattctgatctcctaccaaagccgaataaattcgtggatattggatgcggaaatggtcttcttgttcatcttttgaacaaaatcggaatgtctggatacggaattgacgttcgtcatcgaaacatttggaagaccactctgaaagatgtggacctacgcgaaatgcctgtcgatcctcaaattgtcgttcaaaatgaaccgcacttcgatttagatgtggatttgctcattggaaatcacagtgacgagttaactccatggattccagttatggctgctaaactcaactgcaatttcttcttgattccatgttgcccattcaactttttcggaaagtatgccaacaacggaagccacttaggaccaaaaagaatagtttcacagtatgagtcattcttcgagtggaccgtttcagttgctgaacgacttggatttgatgttaaaattgacagattggcgattccgagcacgaaaagactttgcattatcggacgtgttccagaaggaggactatgcccaaatgtggacgaaaccatcaattcaatgactgaaggacaaaagtttattgcaagaccaaaggaaatcaaaacaacgaattgtatgaacattcctgtgactgatcgtgaaagaatcgccaagaaattatttgattttgttttgaattattctgatgcagtcagagatggatggcgttgtggaggtgaagttcctttggcccagcttgctgcgcttctcacagaagaagacaaaaaactaatgaaagatcaggacggaggacttcaaacttttcttcgaaatcaacatcaaatctttcacgtataccaagccactgctcgtcttcgtgatttccgtcagccagttgttcaaaaacgtcaatcctggaagccaaaaaaggcggaaacgatcagaaaagcaccatgctggatgtcacttcatcatccagatggttgtccagttggacaagaagcttgtcgttatgaacattaa

SEQ ID NO: 6839 - protein, 563 aa, Caenorhabditis elegans
MFPGSTWTVIVEQIAEYEEVIDPKAFFDKIISLWKEYPNAISNRITTSVSVDTDSDLWNEVLRTFETHYKFCPRDCSEIAITKIIHKDLANNKFSDNAFEVSYYEEELLVRFYPITLDGMQHPHFESPYSIAIKIPTDTSIQLQFLKQANSSQEHFEFMKKQAFKQLYTWLKGIDLSKSSRKTNSLLDKESYIKTYRHIREDYGRGMIKGWTENSNPQKSIFEDCGIASYINELVNSDLLPKPNKFVDIGCGNGLLVHLLNKIGMSGYGIDVRHRNIWKTTLKDVDLREMPVDPQIVVQNEPHFDLDVDLLIGNHSDELTPWIPVMAAKLNCNFFLIPCCPFNFFGKYANNGSHLGPKRIVSQYESFFEWTVSVAERLGFDVKIDRLAIPSTKRLCIIGRVPEGGLCPNVDETINSMTEGQKFIARPKEIKTTNCMNIPVTDRERIAKKLFDFVLNYSDAVRDGWRCGGEVPLAQLAALLTEEDKKLMKDQDGGLQTFLRNQHQIFHVYQATARLRDFRQPVVQKRQSWKPKKAETIRKAPCWMSLHHPDGCPVGQEACRYEH

SEQ ID NO: 6840 - DNA, 1689 bp, Caenorhabditis briggsae
  CDS (1)..(1689)
atgtccccctggcgatgcatcgcagaacagctcgtcgaatacgaggaaccagtcgacgcaaaggcgtattttgacaaaataatttgcctgtggaaggagtatccgaatgcaattagtaaccgaatcaacacctctgtccctgtggaagaagaatctcaagtctggaatgaagtgatagccaatttcgagtcaaaatatcgatttgatccggcgaattccagtgaattgagcatttttaaattgattcagcgggactataaaaggcaatcgttctcgaataattgctatgaagtcgcgttttatgaagaagaactcttggtccgtttctacccgattgtcctcgacggccaacaacatccacactttgagagtccctactcgattgcctgtaaaattccatcgaattcctcgattttgctccaattcttcaagcctgtagatactccagatgaccattttgagttcttgaagacgttggcgttcaagcagctggtcacctggttgaagagtatcgatttgtcaaaaacaactcgaaaaacgcactctctcctagacaaggaatcttatatatccacttatcgacacattcgagaggatcttggacgtccgctagtcgaagggtggactgaaaattcgaaaccgcagaaagtgattttcgaggattgcggaattgcatcgtatattcaggagctcatcactagtggaatcctcccaaaacctcggaaatttgtggatatcggatgtggaaatggtcttttggtgcacttgttgaataagattgggattcccggctacggcgtcgacgttcgttctcgaaaagtctggaagacgactctaagccacgtggatcttcgagaatcgcctgttgatccgcagattgtcgttgagaatcgcccgcatttcgatgctgacgtggatttattgattggaaatcacagcgatgagctcacaccctggattccggttatggcggcgaaactaaactgcaacttcttcctgatcccatgctgcccgtacaactttttcggcaaatatctgaataatggaagtcatttgggaccgaaacgaatgacatctcaatacgaatccttcttcgaatggaccgtttctgtgtccgaaagactcggttttgataccaaaatggaccgtttggcgattcccagcacgaaaagactctgtatcattggacgtgtgccagaaaaaggattgtgtccatcactcgaacaaaccattgagcacatgactcagggacagaagttcgtggcgagacccagagagattagaaataacaattgtatgcacatttcggtgacggatcgagagcggatagccaagaagctgttcgatttcatcttgaatgcatctgatgacgttagagacggttggcgatgcggaggcgaggttccattggcccagctggctggccagctcactgacgatgataagaagctgatgaaggatcaggacggcggactgcagacgttcctcagaaatcaccatcaaattttccacgtcttccaagcgacggcccgtcttcgtgacttccgtcaaccggttgtctctcgtcgtcaacagacgaatccgaagaaacaagaagcgacgaatcgcccgaaacaaccgtgttggatgtcgctgaaccatcccgatggatgcccattgggaccagaatcctgtcgttatcttcattag

SEQ ID NO: 6841 - protein, 562 aa, Caenorhabditis briggsae
MSPWRCIAEQLVEYEEPVDAKAYFDKIICLWKEYPNAISNRINTSVPVEEESQVWNEVIANFESKYRFDPANSSELSIFKLIQRDYKRQSFSNNCYEVAFYEEELLVRFYPIVLDGQQHPHFESPYSIACKIPSNSSILLQFFKPVDTPDDHFEFLKTLAFKQLVTWLKSIDLSKTTRKTHSLLDKESYISTYRHIREDLGRPLVEGWTENSKPQKVIFEDCGIASYIQELITSGILPKPRKFVDIGCGNGLLVHLLNKIGIPGYGVDVRSRKVWKTTLSHVDLRESPVDPQIVVENRPHFDADVDLLIGNHSDELTPWIPVMAAKLNCNFFLIPCCPYNFFGKYLNNGSHLGPKRMTSQYESFFEWTVSVSERLGFDTKMDRLAIPSTKRLCIIGRVPEKGLCPSLEQTIEHMTQGQKFVARPREIRNNNCMHISVTDRERIAKKLFDFILNASDDVRDGWRCGGEVPLAQLAGQLTDDDKKLMKDQDGGLQTFLRNHHQIFHVFQATARLRDFRQPVVSRRQQTNPKKQEATNRPKQPCWMSLNHPDGCPLGPESCRYLH

SEQ ID NO: 6842 - DNA, 1701 bp, Neurospora crassa
  CDS (1)..(1701)
atggaatgcgagactgacagggctggctgtccagattttgcctcgattttccaagctaccatcggcttctccgcgccttctccaggccattctggactcagacacgccagagtccagtcacagccgaccgtcactggcaacctcaacccaacttacggcaatgcgccatcaaccacgaacagtatgcctaaattcaccccggaagagctggcagtcaatgccgtcccggtcattcggcaggcgacctctggtgatgcggaaccagactggcgacctctctttcgtcatgaatgcaccttcaacccggtcatctttcaagatgtcatgctcaacttgatcaagaacccaaacatcaactcgtcttggctcttccgcgccgatattctctatgatacagagaagaacatccagaatggcttggagacccccctgtcggagctgggagacgtgcccgacatcccatccttcgacggctttgggcttcaccgacgtttgattcgccggcttattcctcggagcaccatgagggacaagcccatggatcagacatgtctcatctaccagagtaagggtagtgattccgagggcggtttgcagaggcatttggttatctatctcccccacgtctccacagaggccgagatgccctattatcaccctacggtccgaggcatagcctttcaccatgagtggtctcccacagagacgcgcggatctgtttctgtctcctatctctacttcgaagggggcgagcgccccgagaagctcacgaggatcgcctctcacttgcttcaagccgtatacaaacatggacaaggcagagctgacggttatcagaaacgggtgcaccatgatctcttggtaccgcaggaccgcgtgcaaaacacgtacacagcgttgaagcagaaatacgcccgcgctctgatcgagtcatgggtcgaaagtaccgaccctaccaagcatgtctttgaagacctctgcatcgctgcctttctcatcgagctgtggaccgacatctatggacggaattttttccctgggttcgttgacatcggctgcgggaacggcctcttggtccatattttgaacctggaaggtttcaagggctggggcttcgatgccaggtcacgcaaatcgtgggcaacgtacagcacccgtctggaaacccccacaggtgttcaggagtccttacagcagctagtcttgctaccgccgcctgtcagtagggctgggatttccgagatctcaagtgaaggcttccgggaagagctcgtccatgatggccggtttcctaagggcaccttcattatatccaaccacgccgatgaattgacgccctggacgcccattttggctgccatatcagattgtcctttcatcatgattccttgctgtagccacgacctgacaggggcgaggttccgtgcgccagcacccaaagacaagaagaaggctaactcggcatattcttccctcgtttcatgggtcacccagatcaccgcggattgcggctgggtagccgaacaggagatgttaaggatccctagcacgcgcaatacagcgatagtcgggcgcaagcggcagggcgacgtgtcggctattgacattggagtcattgtcgatcgatacggaggcaccgctggctacctggagacagtagtgaagttggtgaagtctaccaatctggacgagaagcactga

SEQ ID NO: 6843 - protein, 566 aa, Neurospora crassa
MECETDRAGCPDFASIFQATIGFSAPSPGHSGLRHARVQSQPTVTGNLNPTYGNAPSTTNSMPKFTPEELAVNAVPVIRQATSGDAEPDWRPLFRHECTFNPVIFQDVMLNLIKNPNINSSWLFRADILYDTEKNIQNGLETPLSELGDVPDIPSFDGFGLHRRLIRRLIPRSTMRDKPMDQTCLIYQSKGSDSEGGLQRHLVIYLPHVSTEAEMPYYHPTVRGIAFHHEWSPTETRGSVSVSYLYFEGGERPEKLTRIASHLLQAVYKHGQGRADGYQKRVHHDLLVPQDRVQNTYTALKQKYARALIESWVESTDPTKHVFEDLCIAAFLIELWTDIYGRNFFPGFVDIGCGNGLLVHILNLEGFKGWGFDARSRKSWATYSTRLETPTGVQESLQQLVLLPPPVSRAGISEISSEGFREELVHDGRFPKGTFIISNHADELTPWTPILAAISDCPFIMIPCCSHDLTGARFRAPAPKDKKKANSAYSSLVSWVTQITADCGWVAEQEMLRIPSTRNTAIVGRKRQGDVSAIDIGVIVDRYGGTAGYLETVVKLVKSTNLDEKH

SEQ ID NO: 6844 - DNA, 1707 bp, Xenopus laevis
  CDS (1)..(1707)
atgccggagttggcttcggtgcttgtgagagacgagcgctcagtgcttcccgggggcttctgggctgctgtcgctgtgtggctggagaagccgcaggttctgaacaagcgactgtgcggttccaccgtaggaaagaaatgggatcatgtgggggaagagagcgagtctgaagggatcgatgtggagacggcacttgctgcattgctggaggacatgtcgggcccggggcgggatgaggagatgctgaagctgatcagcggatacgggaagagagaagaggacagtggctcgctcacactccggactctcatccccaagtcaaacccgcactttccgtcgtgccagccccgctgcgagattgttattcgagatctgcctaacagcgttgtgacattcctacctctggatgaagcaaatcagtttaagaaaaacaacatttatcaaatccgtctcgcacatgtccaggatgatgaatggtcaatctccctctatacgttgtgctccgaggcctgggaaagtgatggagttgtgtaccctaaaataacctggatgaaaaatgagctgctttccaagctggcaaagtggtccacggaggacaagaaaagtgaatttaaaagcaccttatcgctcgttcctgtcgataaatatagccgactttatcagaacctgaaggaaaaatacagagacatggtgaaggtctggcccgaagttactgatcctgagaaatttgtttacgaggatgttgctatcgctacctacttgttgattatctgggaagaggagagatcgcagaatcaattaaaagtaaaacagtcatttgtggacttgggatgtggaaatggtctcttggtccatatactgagcaacgaggggcatcctggcagaggaattgatgtccgaagaagaaaaatatgggatatgtatggaccacagactattttagaggaatctgccattctcccaaatgatgattacttgtttccagacacagactggctcatcgggaaccactcggatgagctgactccttggcttccagttattgcatctcggtcctcctactcttgccgctacttcgtactgccttgctgctttttcaatttctatggaaaatacaatcgaaaatcaagtaagaaaacccagtacagagaataccttgactttgtgaaagaagtcggtcagcagtgcggatttaatgtagaagaggactgccttagaattccttctactaaaagggtgtgccttatagggatgtctagaacttacccactgacccaggaaaaacaaatcgatgagcaaaggacacgctacataaagagccaacatactgacagtttacacatttctaccaagtcgtccttagacaaagatgatcctccacccttaaactgccatgcaaaaaacggccaagtggacaatgtggactcttctctggttcaatctgaaaagcttccaggaagctggatgcctggattccaaccccgggaaaaagaggaacccatccgaaactgtgctcttcttcctagggactttatcgatgaaacggtattgcaagtagccaagttgctgttatattcaaacacaaaggaaagggaaacccctattactgaccaaagtgagactgtttggaacacgggaaggtctctgacattacgggaagttgcagagcatcttcacacagacacactgcaaaaaaaaaaaaaatag

SEQ ID NO: 6845 - protein, 568 aa, Xenopus laevis
MPELASVLVRDERSVLPGGFWAAVAVWLEKPQVLNKRLCGSTVGKKWDHVGEESESEGIDVETALAALLEDMSGPGRDEEMLKLISGYGKREEDSGSLTLRTLIPKSNPHFPSCQPRCEIVIRDLPNSVVTFLPLDEANQFKKNNIYQIRLAHVQDDEWSISLYTLCSEAWESDGVVYPKITWMKNELLSKLAKWSTEDKKSEFKSTLSLVPVDKYSRLYQNLKEKYRDMVKVWPEVTDPEKFVYEDVAIATYLLIIWEEERSQNQLKVKQSFVDLGCGNGLLVHILSNEGHPGRGIDVRRRKIWDMYGPQTILEESAILPNDDYLFPDTDWLIGNHSDELTPWLPVIASRSSYSCRYFVLPCCFFNFYGKYNRKSSKKTQYREYLDFVKEVGQQCGFNVEEDCLRIPSTKRVCLIGMSRTYPLTQEKQIDEQRTRYIKSQHTDSLHISTKSSLDKDDPPPLNCHAKNGQVDNVDSSLVQSEKLPGSWMPGFQPREKEEPIRNCALLPRDFIDETVLQVAKLLLYSNTKERETPITDQSETVWNTGRSLTLREVAEHLHTDTLQKKKK

SEQ ID NO: 6846 - DNA, 22 bp, Artificial sequence
  primer
atgactggcgacggtagtgcac

SEQ ID NO: 6847 - DNA, 26 bp, Artificial sequence
  primer
ttaatggtttcttgggtttcttttca

SEQ ID NO: 6848 - protein, 332 aa, Artificial sequence
  consensus sequence
  Variant (2)..(7): Xaa in position 2 to 7 is any amino acid
  Variant (9)..(14): Xaa in position 9 to 14 is any amino acid
  Variant (15)..(15): Xaa in position 15 is any or no amino acid
  Variant (17)..(17): Xaa in position 17 is any amino acid
  Variant (18)..(20): Xaa in position 18 to 20 is any or no amino acid
  Variant (22)..(22): Xaa in position 22 is any amino acid
  Variant (24)..(24): Xaa in position 24 is any amino acid
  Variant (26)..(26): Xaa in position 26 is any amino acid
  Variant (28)..(30): Xaa in position 28 to 30 is any amino acid
  Variant (33)..(34): Xaa in position 33 to 34 is any amino acid
  Variant (37)..(41): Xaa in position 37 to 41 is any amino acid
  Variant (43)..(52): Xaa in position 43 to 52 is any amino acid
  Variant (53)..(74): Xaa in position 53 to 74 is any or no amino acid
  Variant (76)..(76): Xaa in position 76 is any amino acid
  Variant (78)..(78): Xaa in position 78 is any amino acid
  Variant (87)..(88): Xaa in position 87 to 88 is any amino acid
  Variant (90)..(91): Xaa in position 90 to 91 is any amino acid
  Variant (94)..(95): Xaa in position 94 to 95 is any amino acid
  Variant (97)..(97): Xaa in position 97 is any amino acid
  Variant (99)..(99): Xaa in position 99 is any amino acid
  Variant (101)..(101): Xaa in position 101 is any amino acid
  Variant (103)..(103): Xaa in position 103 is any amino acid
  Variant (106)..(106): Xaa in position 106 is any amino acid
  Variant (108)..(135): Xaa in position 108 to 135 is any amino acid
  Variant (136)..(209): Xaa in position 136 to 209 is any or no amino acid
  Variant (214)..(214): Xaa in position 214 is any amino acid
  Variant (219)..(219): Xaa in position 219 is any amino acid
  Variant (221)..(221): Xaa in position 221 is any amino acid
  Variant (223)..(231): Xaa in position 223 to 231 is any amino acid
  Variant (232)..(239): Xaa in position 232 to 239 is any or no amino acid
  Variant (243)..(247): Xaa in position 243 to 247 is any amino acid
  Variant (249)..(252): Xaa in position 249 to 252 is any amino acid
  Variant (253)..(318): Xaa in position 253 to 318 is any or no amino acid
  Variant (320)..(325): Xaa in position 320 to 325 is any amino acid
  Variant (326)..(329): Xaa in position 326 to 329 is any or no amino acid
  Variant (331)..(331): Xaa in position 331 is any amino acid
YXXXXXXYXXXXXXXWXXXXEXTXPXKXXXEDXXIAXXXXXLXXXXXXXXXXXXXXXXXXXXXXXXXXXXXXXXFXDXGCGNGLLVXXLXXEGXXGXGXDXRXRKXWXXXXXXXXXXXXXXXXXXXXXXXXXXXXXXXXXXXXXXXXXXXXXXXXXXXXXXXXXXXXXXXXXXXXXXXXXXXXXXXXXXXXXXXXXXXXXXXXXXXXXXIGNHXDELTXWXPXXXXXXXXXXXXXXXXXPCCXXXXXGXXXXXXXXXXXXXXXXXXXXXXXXXXXXXXXXXXXXXXXXXXXXXXXXXXXXXXXXXXXXXXXXXXXXXXGXXXXXXXXXXPXT

SEQ ID NO: 6849 - DNA, 1407 bp, Saccharomyces cerevisiae
  CDS (1)..(1407)
atgaattttgttacctgccatgttcagatgaggcttcttctccaaaggagactagtgcgtttacgagaatcagagctgtttagaccccagacatcattgtcaactttcaaaagacatgcttcgcaaaagacacgccctatacaaaaatgctcgagaaaatacgcacgtatacttctgttgtctgttttggtaccttacacaggatatgcgttttatgtatcattggctacagtgaagcaaattgatttaagaaacgaaatgtgtcaaagattagaggagaataataacgaggtcacttataagggatccttgctaaaatatagccctttggaagttttaggcagatttgagaacccgttcgaagaatacaggattcagaccgtttttgaattctttgcaaatagagtgttcgaattatttgaaagaaataggggaggtattccacgtgatgtacaccaaatgaataagttaatgcctgtacacaagccaacatgggggcctaacttagtggacgtcgaccccgcagaggaaacggcattgccgctagaatgcaaagtgttagacgaattgcacataccgactgcagtagaagaaaatgaaggatcaaagtgcccagtctataacacatggctgggccagtcctgtaactacacggtttataatggattgaggatacttactgatcctctgttcagtgactttcttatccacaagaccctgggtcctaaaagaattactcaaatgccatctcaaattacagaggtgcccaaaccagatatcatccttgtatcccataatcaccccgatcacctggatttagaaagcttggaatactggagtggcaaagactctcccttatggatagtacctaaaggaatgaaatcttatatgacaagtaacggctgtgataatgtcctagaattatcttggtgggaaactttgcaagtaaagaaaaacaatgagatataccacatatcggctactcctgccatgcattggtctgggagatcgctcttagatacgaacaagtctctatggtgctcctttttattaacacaccatggtaatcccatactttttcatgctggtgacactggatatgtgaaagatttattcgttagaattaaagaacgctttggcaaaggttgtaaattagcgctgcttccatgtggtcagtattgccctgagtggcaccaaaaaccacgacatattaatcctcaagaggttctcaagattatgaaagatctagaagctcgaaatgtattaggcgttcattgggggacctttgtattaagcggagaatatttcttagagccaaaggaaaaattagaaatgttggccgagtggggtgggtttaaagaccgctgctactgtccagaattgggcaagacagaatgcttcgactaa

SEQ ID NO: 6850 - protein, 468 aa, Saccharomyces cerevisiae
MNFVTCHVQMRLLLQRRLVRLRESELFRPQTSLSTFKRHASQKTRPIQKCSRKYARILLLSVLVPYTGYAFYVSLATVKQIDLRNEMCQRLEENNNEVTYKGSLLKYSPLEVLGRFENPFEEYRIQTVFEFFANRVFELFERNRGGIPRDVHQMNKLMPVHKPTWGPNLVDVDPAEETALPLECKVLDELHIPTAVEENEGSKCPVYNTWLGQSCNYTVYNGLRILTDPLFSDFLIHKTLGPKRITQMPSQITEVPKPDIILVSHNHPDHLDLESLEYWSGKDSPLWIVPKGMKSYMTSNGCDNVLELSWWETLQVKKNNEIYHISATPAMHWSGRSLLDTNKSLWCSFLLTHHGNPILFHAGDTGYVKDLFVRIKERFGKGCKLALLPCGQYCPEWHQKPRHINPQEVLKIMKDLEARNVLGVHWGTFVLSGEYFLEPKEKLEMLAEWGGFKDRCYCPELGKTECFD

SEQ ID NO: 6851 - DNA, 1179 bp, Bos taurus
  CDS (1)..(1179)
atggatgaaaatgaaaccaaccagctcctgatgacaagtaaccagtatcctaaagaagcagtaagaaagcgccaaaattcacgaaattctggaggaagtgattcttctaggttttccaggaagagtttcaaactggattacagactagaagaagatgtaactaaatcaaagaaaggaaaggatgggagatttgttaacccttggccaacgtggaaaaatccctctattccaagtcttctcagatgggtgataacggaaagagatcacagcagcgttccatgctccaaagagcttgataaagaactcccggtgcttaagccatattttattgatgaccctgaagaagctggagtgaggggagctggcttaagagtcacatggctgggacacgcaacagtgatggtggaaatggacgagctcatcttgctcacggatcccatcttcagtgctcgggcctccccatcgcagcgcatgggtcccaagcggtttcgtcgtgccccatgcactgtcgaggagctgccccggatagacgcggtccttgtcagccacaaccactacgaccacctggactgcaattctgtcatcgctctcaatgagcgattcggtaacgagctgagatggtttgtgcccttggggctcctggactggatgcagaaatgcggctgtgagaatgtgatcgagctggactggtgggaggagaactgtgtccccggacatgacaaggtcacctttgtgttcacgccttcccagcactggtgtaagaggaccctgatggatgacaacaaggttctctggggcagctggtctgtcttggggccttggaaccgattttttttcgcaggagatactggttattgctctgcttttgaagagataggaaaaagatttggcccttttgaccttgcagctattcccattggcgcgtatgaaccaaggtggtttatgaagtaccagcacgtagacccagaagaggctgtaaagattcacattgatgttcaggcaaagaagtctgtggcaattcactggggaacttttgccttagcaaatgagcattatttagagcctccagcgaaactgtgtgaagctctagaaaaatacagacttaagactgaggattttcttgtcctgaagcacggtgaatcaagataccttaatactgatgatgaagatgttgaataa

SEQ ID NO: 6852 - protein, 392 aa, Bos taurus
MDENETNQLLMTSNQYPKEAVRKRQNSRNSGGSDSSRFSRKSFKLDYRLEEDVTKSKKGKDGRFVNPWPTWKNPSIPSLLRWVITERDHSSVPCSKELDKELPVLKPYFIDDPEEAGVRGAGLRVTWLGHATVMVEMDELILLTDPIFSARASPSQRMGPKRFRRAPCTVEELPRIDAVLVSHNHYDHLDCNSVIALNERFGNELRWFVPLGLLDWMQKCGCENVIELDWWEENCVPGHDKVTFVFTPSQHWCKRTLMDDNKVLWGSWSVLGPWNRFFFAGDTGYCSAFEEIGKRFGPFDLAAIPIGAYEPRWFMKYQHVDPEEAVKIHIDVQAKKSVAIHWGTFALANEHYLEPPAKLCEALEKYRLKTEDFLVLKHGESRYLNTDDEDVE

SEQ ID NO: 6853 - DNA, 1395 bp, Gallus gallus
  CDS (1)..(1395)
atggtgcggggcagggcgctgtggagctgctgcctgcagctgagcgcgctgccctcggcggtgtgctgcgcgtgcgggaagccgcagccgttcaacagctcctgctggagagccgtggagccgccgcggagggggtggagcggcaccatggaggaggaggaggaagaagaggacgggactgctcgggggcagcggcccgggagttctcaaaaaaatatggataaaacagaagagcctgctccatctgcatccagccagtaccctaaggaagcagtgaggaaacatcacaactcagatcgaggatccaggggcagtgacacttccagagcctccaggaaaagcttcaggctggactacaggctagaagaagatgtaacaaaatcaaagagaggcaaagatgggagatttgtcaacccatggccaacatggaagtcaccaaccttgcccaatgttttgaaatggtgcctcatggaaaaagataacagcaatgtgccatcttcaaaacaggaacttgacaaagagcttccagtgttaaaaccatactttgttcaaaacccggaactcgttggaaaaacaggaactggtatgcgagtcacgtggttgggacatgcctcagttctggtggaaatggatgaactggtatttcttactgaccccatcttcagccagcgggcttcccctgtgcagctgatgggccccaagcgcttccgaccacctccgtgcacagttgatcagctccccaaaatagatgctgtcgtcatcagccacacccactatgaccatttggactacaacactgtaaaaagtttaaatgaacgcttcggcagtgagctgcgctggtttgtgcctctggggctcttagactggatgcagagatgcggttgtgagaatgtgattgaactggattggtgggaagagaactgtgtccctggtcacgatgcggtgacttttgtctttaccccttctcaacactggtgcaaaaggactgtgacagatgacaacaaggttctgtggggcagctggtctgtcttgggaccttggaatagatttttctttgcaggagacaccggatactgtgttgcttttgaacagatcggtaaaagatttggacctttcgaccttgcagccatccccattggagcttatgagccaaggtggtttatgaaacatcaacatgtggatcctgaagaagcagtaagaatccatattgatgttcaagcgaagaagtctgtagcaattcactggggaacctttgctttagcaaatgagtattacttggatcctccggttaaactgaatgaagctcttgaaagatacggcttgaaaaaagaagacttctttgtcttaaaccatggagagtcacaggacttgagtacaaacgatgggtctgaatag

SEQ ID NO: 6854 - protein, 464 aa, Gallus gallus
MVRGRALWSCCLQLSALPSAVCCACGKPQPFNSSCWRAVEPPRRGWSGTMEEEEEEEDGTARGQRPGSSQKNMDKTEEPAPSASSQYPKEAVRKHHNSDRGSRGSDTSRASRKSFRLDYRLEEDVTKSKRGKDGRFVNPWPTWKSPTLPNVLKWCLMEKDNSNVPSSKQELDKELPVLKPYFVQNPELVGKTGTGMRVTWLGHASVLVEMDELVFLTDPIFSQRASPVQLMGPKRFRPPPCTVDQLPKIDAVVISHTHYDHLDYNTVKSLNERFGSELRWFVPLGLLDWMQRCGCENVIELDWWEENCVPGHDAVTFVFTPSQHWCKRTVTDDNKVLWGSWSVLGPWNRFFFAGDTGYCVAFEQIGKRFGPFDLAAIPIGAYEPRWFMKHQHVDPEEAVRIHIDVQAKKSVAIHWGTFALANEYYLDPPVKLNEALERYGLKKEDFFVLNHGESQDLSTNDGSE

SEQ ID NO: 6855 - DNA, 1053 bp, Mesorhizobium loti MAFF303099
  CDS (1)..(1053): transl_table=11
atgtctaggggccgaaacccgctggagcataccttggccgcgagaaagaaagccgccaaccgctattacagcggtccgcccagcgaccatttcgatggcaccttgttcttcaaccccggcggccagatgcccggccgcttcaccgatctgctgaaatggcagttcaacggccaacgcgcgaaatggccagcgaccagcccgagcccctttccgcaggcaaggcccgccgcgaaggtcgaaggcaccgacctcaccgtaaccatggtcggccattcgaccttgctgatccagacggccgggctgaacatcctcaccgacccggtctggtcgcaacgcacctcgccgttttccttcgccgggccaaaacgcgtcaatgcgccgggcatcgtcttcgacgatctgccgccgatcgacctcgtgctggtcagccacaaccattacgaccatctcgacctcgccacgctgaagcggctgaaggagaagcacgatccgctggtggtgacgccgctcggcaacgatgtgctgatcggcgaggcggttcccgatatgcggctttcggcgcatgactggggagacaaggtcgacatcgctgaccgcgccgccatccacatcgagccggcgcatcactggtcggcgcgcggcgcccgcgaccggcgcatggcgctgtgggccggcttcgtcatcgagacgccgggcggcaaactctatttcgccggggataccggcttccacgacggcatcaactaccggctgatggcggacaaacatggcggcttccgcttcgccatcctgccgatcggcgcctatgagccgcgctggttcatggcgccgcagcaccagaaccccagggaagcggtgcaaggcatgaagctatgcaaggccgccttcgccgccggctgccactggggcactttccacctcaccgacgaaccgatggacgagccggtccgcaaactggccgaggcgctggacgccgagggcctgccgcaggagcgctttcgcgccttgcaacccggcgaggtttgggacgtgccggagatcgaccaccgctga

SEQ ID NO: 6856 - protein, 350 aa, Mesorhizobium loti MAFF303099
MSRGRNPLEHTLAARKKAANRYYSGPPSDHFDGTLFFNPGGQMPGRFTDLLKWQFNGQRAKWPATSPSPFPQARPAAKVEGTDLTVTMVGHSTLLIQTAGLNILTDPVWSQRTSPFSFAGPKRVNAPGIVFDDLPPIDLVLVSHNHYDHLDLATLKRLKEKHDPLVVTPLGNDVLIGEAVPDMRLSAHDWGDKVDIADRAAIHIEPAHHWSARGARDRRMALWAGFVIETPGGKLYFAGDTGFHDGINYRLMADKHGGFRFAILPIGAYEPRWFMAPQHQNPREAVQGMKLCKAAFAAGCHWGTFHLTDEPMDEPVRKLAEALDAEGLPQERFRALQPGEVWDVPEIDHR

SEQ ID NO: 6857 - DNA, 1179 bp, Vibrio cholerae O1 biovar eltor str. N16961
  CDS (1)..(1179): transl_table=11
atgtcagaaacggccattcagactaaaacacaagcacgtcaacgcaaggtgtttgctcaccaccatgttcaacactatcgctcgcagttagagcgccggatctcccactcacctcaatttcgagagggcaaagtgatcaacgctatgcctcatattaccgctacaccatcatggtggcagacagcttggagttactttggggggagagctcagctcaagcctaatgctcagttgcccgtagcacctctcaacctgcaagcgttgcaaacacgcagcaaggcacttcgagtcacttggcttggccactctagtttgtttattgaagtcgatgggctacgagtattgaccgatccggtgtttgattacgcttcgccttggattgcgaaagcgtggtttgccagaaacctgcctaatagtggtgtgcgggagcagttaccactgccggatgtgattgtgatctctcacgatcattatgaccatttagagcaggccagtgttgtctattatgccgcgcattcggtcaccttctatgttccgctgggtgtcgggcagcatttgattcgctggggagtctcacctgaacgaattatcgaattcgattggtgggagcagataaaacgagaaggcgtcgagtttatttgtactccagctaatcacaattcaggacgttattatctcgatcataatgcgaccttgtggtgttcatgggtcataaaaggccatcaagaaacactctatttcagtggtgatagtgcctatgatacacattttgcaaagattgctgagcgctgtgggccgattgatttggcttgtctagaagtggccgccgatgttaagcagcaccaaggttatcccgttgaaaattggggacacatgcaggcgaaacacacagttcaagcctttcgcgacttacaagctaaaaaactgctgccgattcactgggcgacttatgagttgtttacccaccaatgggatgagccgattgccgatctggttaagcattgccaagagcagtcgatcactttgctaacccctatggcaggagaaagcctaaccatggcaaaccacagcgcaagccacgcttggtggcaaggtttagaaactgagcccatgagtggtgctcgatattggcaaatgggcttagcgtgttctttattattgctgctgatggtggtgtaa

SEQ ID NO: 6858 - protein, 392 aa, Vibrio cholerae O1 biovar eltor str. N16961
MSETAIQTKTQARQRKVFAHHHVQHYRSQLERRISHSPQFREGKVINAMPHITATPSWWQTAWSYFGGRAQLKPNAQLPVAPLNLQALQTRSKALRVTWLGHSSLFIEVDGLRVLTDPVFDYASPWIAKAWFARNLPNSGVREQLPLPDVIVISHDHYDHLEQASVVYYAAHSVTFYVPLGVGQHLIRWGVSPERIIEFDWWEQIKREGVEFICTPANHNSGRYYLDHNATLWCSWVIKGHQETLYFSGDSAYDTHFAKIAERCGPIDLACLEVAADVKQHQGYPVENWGHMQAKHTVQAFRDLQAKKLLPIHWATYELFTHQWDEPIADLVKHCQEQSITLLTPMAGESLTMANHSASHAWWQGLETEPMSGARYWQMGLACSLLLLLMVV

SEQ ID NO: 6859 - DNA, 1113 bp, Bacillus halodurans C-125
  CDS (1)..(1113): transl_table=11
atgaaaaaatatatgctctatatgattgcttctattattgtattatgtctgatcattttatcgtacctaaacttgcaccctgtgttcggggaaaatccaagtaaagagcagaaaaagatgtatgaagggttcgacaattatgttgatggaacatttgttaatctagtaccaaccacgatggatatgggaggcatctccggagggctttcactacttagggacgccatttcaggtggtcaagaccgtaatcctgatgatcaccttccagttacagatataaattggcctatcatcaatagtgaagaagatagcctcacttggtttggacattcagcttttttactaagcatcgatcagaaaaaaatacttgtagatcccatgctaggaccggttgcctcgcccgttccttttgctggaagcaaacgctatagtgaggatatgttacatattattgatgagatgccgcctattgatgctgtatttattacccacgatcattacgatcatttagactacccttccatcctcaggctaaaaaacaaggttgagcatttcttcgttccttacggtgtaggtgctcatcttattcgttggggagtagaagaagaaaagatttctgaactcaattggtgggatgagaccaagtttaaaggtttgaccattgcattcactccatcgaagcatttctccgggagaggacttttcaatcgaaattcaacgttatggggtggctgggtcattctcggcaaccaaacacgtttctacacgagtggtgatggcggttatgattcacattttgaagaaattggtgaaaaatacggcccatttcatataactttaatggaaggaggacaatatgatcatcgttgggattgggttcatatgacacctgaagaagccgttcaggctcatcttgatgtcaatggagagaacatgatgttaattcactggggagcgtttaccctcgcctatcacggatggacagaaccgatcgaaagagctttagaagcagcagaaaaagaagacgtgaatatgcttgctcctagcattggggaaaccgttattttggatggacaatacaccaaacctgaatcgttatggtgggaaatgtaa

SEQ ID NO: 6860 - protein, 370 aa, Bacillus halodurans C-125
MKKYMLYMIASIIVLCLIILSYLNLHPVFGENPSKEQKKMYEGFDNYVDGTFVNLVPTTMDMGGISGGLSLLRDAISGGQDRNPDDHLPVTDINWPIINSEEDSLTWFGHSAFLLSIDQKKILVDPMLGPVASPVPFAGSKRYSEDMLHIIDEMPPIDAVFITHDHYDHLDYPSILRLKNKVEHFFVPYGVGAHLIRWGVEEEKISELNWWDETKFKGLTIAFTPSKHFSGRGLFNRNSTLWGGWVILGNQTRFYTSGDGGYDSHFEEIGEKYGPFHITLMEGGQYDHRWDWVHMTPEEAVQAHLDVNGENMMLIHWGAFTLAYHGWTEPIERALEAAEKEDVNMLAPSIGETVILDGQYTKPESLWWEM

SEQ ID NO: 6861 - DNA, 918 bp, Bacillus halodurans C-125
  CDS (1)..(918): transl_table=11
ttgccaaagcgatatcaaaaccttgatgaagttggaacgaataaaacgttggtagagatatggaaatgtttacgggaacgatggagtaaatcaaaggatttgagcatccacattccgagagccgatgaaagaaacgtggaggagcttaaaaagaaccgaacaaaaacgtcctatacgtggatcggtcattcgagctttttgctgcaaatgaaagggttgaatattttaaccgaccccgtctttgcgaaatacttaggattttcaaagcggttgatttcgccaggattgtcgatcgatgagcttcctgaaatcgatatcgtcgtcatttcccacggtcattacgatcatcttgaattttcaacattgcgaagtttaaaaggtgaaccaatattttacgtgcctgctgggttaaacttattgtttcagaagaaagggttgcaccgtgtcgaagaggccaattggtgggatacgtttcagcaccaagacctaacaattcacttcgtccctgctcagcattggacgcggcggagcctatttgatacgaatacgtcccattggggaggatgggtgcttgaatcggacgaagaaacgaactattttgtgggggatacaggatactttcgcgggtttcaagagatcgggaaaaaatttgcgctcgatacagtgttcatgccgatcggatcttatgagccagagtggtttacatatgcttctcatattaatccagaggatgcagtcaaagccttcgttgaattacaagcgaaaacgtttgtgccaatgcattatggcacgtatcggctcgctgatgatacaggaccagaagcgttggcgcgtttattgcatgaatggaaaagatgtcaattacctgagcatcagctttttgtcatgaaagtaggagaaacggtgtttaagaaatag

SEQ ID NO: 6862 - protein, 305 aa, Bacillus halodurans C-125
MPKRYQNLDEVGTNKTLVEIWKCLRERWSKSKDLSIHIPRADERNVEELKKNRTKTSYTWIGHSSFLLQMKGLNILTDPVFAKYLGFSKRLISPGLSIDELPEIDIVVISHGHYDHLEFSTLRSLKGEPIFYVPAGLNLLFQKKGLHRVEEANWWDTFQHQDLTIHFVPAQHWTRRSLFDTNTSHWGGWVLESDEETNYFVGDTGYFRGFQEIGKKFALDTVFMPIGSYEPEWFTYASHINPEDAVKAFVELQAKTFVPMHYGTYRLADDTGPEALARLLHEWKRCQLPEHQLFVMKVGETVFKK

SEQ ID NO: 6863 - DNA, 1086 bp, Pseudomonas aeruginosa PAO1
  CDS (1)..(1086): transl_table=11
atgccctccctgcgtcccacctggctgatcagcctgctgaccctggccggctgcgctggcagcgcctatcagggtccgccttcggaccatttcgacggcgaacgtttccgcaatatccagccgaccgcgcacaagagcctgcgcgacctgctcaagtggcagtggaaccgcccgccgcaacgcccgtgggtcgccctgccgccgacggcaacgccgccaagggtgaacgagcgcgcccgcggcgaagaactgcgggtcacctacatcaaccacgccaccctgctgatccagcaccgcggcctgaacatcctcaccgacccggtctggtcgcaacgggtcagcccgctcgccttcatcggcccgaagcgccaccatccgcccgggttgacgctcgaccagttgccaccgatcgacctggtgctagtgagccacaaccactacgaccacctcgacctggaaaccctgcgccagctccaccggcgctggccgacggccaaggtggtcagcggcctgggcaacgccgggctgatccgccagacaggtttcgccgacgtcgtggagatcgactggtggcaggccgtgccgctgggcgctggcctgacgctgcatggcgtaccggtgcagcactggtcgtcgcgcacccgcagcgacaccaaccgcacgctctggctcggcttcgtcatcgactcgccggatggcccgctgctgtttcccggcgataccgggctcggcccggagttcgggctgatcaaccagcgcttcggggcgatgcgtttcgccgccctgccgatcggcgcctacgagccgcgctggttcatgcgcgaccaccacatgaatcccgacgacgcggtgcaggcccatcgcacgctgcaggcgcagaccagcatggccatccacttcggtaccttcaatctcaccgacgaacagcaggacgacccgcccaaggcgctccaggcggcactgcgcagccaaggcgtggacccggcgaccttcggcacgccgaaacccggcgagcagtggcgcgtcgcaccgcgcaacgtcgctcaggaggccgaggccaccaggcgggagcagcagttgcggtag

SEQ ID NO: 6864 - protein, 361 aa, Pseudomonas aeruginosa PAO1
MPSLRPTWLISLLTLAGCAGSAYQGPPSDHFDGERFRNIQPTAHKSLRDLLKWQWNRPPQRPWVALPPTATPPRVNERARGEELRVTYINHATLLIQHRGLNILTDPVWSQRVSPLAFIGPKRHHPPGLTLDQLPPIDLVLVSHNHYDHLDLETLRQLHRRWPTAKVVSGLGNAGLIRQTGFADVVEIDWWQAVPLGAGLTLHGVPVQHWSSRTRSDTNRTLWLGFVIDSPDGPLLFPGDTGLGPEFGLINQRFGAMRFAALPIGAYEPRWFMRDHHMNPDDAVQAHRTLQAQTSMAIHFGTFNLTDEQQDDPPKALQAALRSQGVDPATFGTPKPGEQWRVAPRNVAQEAEATRREQQLR

SEQ ID NO: 6865 - DNA, 1023 bp, Campylobacter jejuni subsp. jejuni NCTC 11168
  CDS (1)..(1023): transl_table=11
ttgaatttatcatttaaaatctttgatatttccaatacacaacgatcaaaagctaaaaaagtgcagggtaaaaaatatgaaatttttcttaatgaaaatgagcacagtcttataactcctaaagtgtcttttaaagaaattttgaggtattattatctttatccaaaaaatgccatcccttcttttaagttaccttttttcaagcctgatttgagtggttttagcaccccacatattacttggcttggccattcttcgctttttataagttttaaagagtataaaattttgattgatcctatttttaacactcatgcttcgcccatttcttttatcaacaaggcttttaaaaatgctcctgtttataatataaatgattttaatgaaatttttgctgtgattatcacgcattcgcattttgatcatttagatgctaagagtgtaaaagctttaaaagataaggctaaattttttatcactcctttaaaagtgggaaattatctaaaaagctatggggtgagcgagaaaaaaatcatagagcttgattggtggagtggaatagaatttggtgatttaaaaatcatggcaacacctgcacagcacagttcaagtaggggagatggtaaaaacaaaaccctttgggcttcttttgtgatggaatttttaagtgtagataagagagtgttttttagcgcagatggagggtattttacacattttaaaaaaataggtgagtattttggaagttttgacctagcttgtcttgaaagcggacaatttaatatcgcttggccatattcacactcttttcctgagcaaattttaaaagaggcaaaagatcttaatgcaaaggctgtcatgcctatacattgggggagatttttagcaggaactcatgcatggaatgaggtggtaaaatttctttatgaaaatttagatttaccccttatcacaccaaaaatgggcgaggcttatgaagtaggagctaaatttaaacaggatttttggtggaaagaagaataa

SEQ ID NO: 6866 - protein, 340 aa, Campylobacter jejuni subsp. jejuni NCTC 11168
MNLSFKIFDISNTQRSKAKKVQGKKYEIFLNENEHSLITPKVSFKEILRYYYLYPKNAIPSFKLPFFKPDLSGFSTPHITWLGHSSLFISFKEYKILIDPIFNTHASPISFINKAFKNAPVYNINDFNEIFAVIITHSHFDHLDAKSVKALKDKAKFFITPLKVGNYLKSYGVSEKKIIELDWWSGIEFGDLKIMATPAQHSSSRGDGKNKTLWASFVMEFLSVDKRVFFSADGGYFTHFKKIGEYFGSFDLACLESGQFNIAWPYSHSFPEQILKEAKDLNAKAVMPIHWGRFLAGTHAWNEVVKFLYENLDLPLITPKMGEAYEVGAKFKQDFWWKEE

SEQ ID NO: 6867 - DNA, 1158 bp, Xylella fastidiosa 9a5c
  CDS (1)..(1158): transl_table=11
atgaaaaaactctggtcccgcgtcatcaaggtgggtgtcggcgtcgccgtcctgggcggcgtcggcgtggccgcctacctgcagcatcccctgttcggcgagctgcccagcggcgagcgccaggcgcgcatcgagcgctcgcccaactacgccgatggcgccttccacaaccagaccgacaccccgctgctgacgaccgaccagacgcaggtgtcgatcatgctggacaacatgcgcaacaagggcaccacgcgcccgccgatgccgctgccggcgaccaagaccgacctgaaggcgctggatgcgagcgacgacgtggtggtctggctgggccactcgtcctactacgtgcaactgggcgggcagcgcctgctgattgacccggtgttcagcgtcaatgcgtcccccgtgccgggcacgaacgtggctttcgacggcaccagcctctacaccgccgccgacgtgcccgcgatcgaccttctggtcatcacccacgaccactacgaccacctggactacccgagcatccaggcgctgcaacagaaggtcggcaaggtcatggtgccgctgggcgtgggcgcgcatttcgagcgctggggctacgacatgcagcgcgtgcaggaggtcgattggtacgacggcctcgccctgtcgcccacgctgcaactcaccgccacgccggcgcggcatttctcggggcgcaccttcaccaagaacaagtcgctgtggatggggctgaccctggtcacgcccgagcggcggctgttcttcagcggcgacacgggctacgggccgcacttcgccgagatcgggcagcgcctcggccccttcgactgggtggcgctcgacatgggccagtacgacccgcgctgggccaacgtccacatgaaccccgagcaggccgcgcaggcggccgaggaactgcacgcgaaggtgctcacgcccgcgcacgccgggcgcttctcgatctctccgcacgactgggatgacccgttcaagcgcatcacggcggcaagccagggccgcagctacgcgctgtggacgccggagatcggccgccccgtccacctggacggtcgcgcgcagaccttcgtggcgtggtggacgaacggtgcagccaacgcgccccagctcgccgctggcgccaaggagcagtaa

SEQ ID NO: 6868 - protein, 385 aa, Xylella fastidiosa 9a5c
MKKLWSRVIKVGVGVAVLGGVGVAAYLQHPLFGELPSGERQARIERSPNYADGAFHNQTDTPLLTTDQTQVSIMLDNMRNKGTTRPPMPLPATKTDLKALDASDDVVVWLGHSSYYVQLGGQRLLIDPVFSVNASPVPGTNVAFDGTSLYTAADVPAIDLLVITHDHYDHLDYPSIQALQQKVGKVMVPLGVGAHFERWGYDMQRVQEVDWYDGLALSPTLQLTATPARHFSGRTFTKNKSLWMGLTLVTPERRLFFSGDTGYGPHFAEIGQRLGPFDWVALDMGQYDPRWANVHMNPEQAAQAAEELHAKVLTPAHAGRFSISPHDWDDPFKRITAASQGRSYALWTPEIGRPVHLDGRAQTFVAWWTNGAANAPQLAAGAKEQ

SEQ ID NO: 6869 - DNA, 999 bp, Xylella fastidiosa 9a5c
  CDS (1)..(999): transl_table=11
atgccacataaccgctactatcaaggcccattaagcgaccacttcgacggcctacgcttcttcaatccaggccaacccaacaccgacaaaccattcagcgacctgttgcgctggcgctgggagagtcgccacctgcccccttggcgcgacgtaccacccacccacgtcgctacccccatcgcacgcagccagcaccccatcatcaccatgattggccactccagcgtgctgatacaaattgcaggactcaacctactcgttgacccggtatggtccgaacgggtcagcccactctcctggttgggtccgcgacgttggaactcccctggtatcgacttcaacgcattaccgcccatcgattatgtactcatcacccacaaccactacgatcatctggacctgaccaccctggcacgcctccagatagcccatgccccccaagtggtgaccccactgggcaacgatgccatcatccgcaagcgcgtccctgacctgcatatacacacccttgattggtgggattcaatacaactgacaaacgaacccaccaaaatcagcgtcgtccccgcctaccactggtcggcacgcggcttacgagacaggtgcatggcactgtggggcggcttccacctacacacaccccaagggagcctctacattgctggcgacaccgcctatgggaatggcagcatcttccacgcaatcgcgcaacgctgcggtgctccagatctggccatcctgcctatcggcgcctatgcgccacgctggttcatgcacaaccaacacatcgatgccgtggaagccgtgcagattatgtgcgacgtaggcgcacaccaagccttgggagtgcattggggcaccttccgcctgaccgacgaagccgtagaagaaccacctaccctcttagctcaagccctacaagccaaaggcattcctgcaacccgcttcattgcgatgacacccggtcaaagaaatcggtggaaagcttccgaacggtaa

SEQ ID NO: 6870 - protein, 332 aa, Xylella fastidiosa 9a5c
MPHNRYYQGPLSDHFDGLRFFNPGQPNTDKPFSDLLRWRWESRHLPPWRDVPPTHVATPIARSQHPIITMIGHSSVLIQIAGLNLLVDPVWSERVSPLSWLGPRRWNSPGIDFNALPPIDYVLITHNHYDHLDLTTLARLQIAHAPQVVTPLGNDAIIRKRVPDLHIHTLDWWDSIQLTNEPTKISVVPAYHWSARGLRDRCMALWGGFHLHTPQGSLYIAGDTAYGNGSIFHAIAQRCGAPDLAILPIGAYAPRWFMHNQHIDAVEAVQIMCDVGAHQALGVHWGTFRLTDEAVEEPPTLLAQALQAKGIPATRFIAMTPGQRNRWKASER

SEQ ID NO: 6871 - DNA, 1137 bp, Agrobacterium tumefaciens str. C58
  CDS (1)..(1137): transl_table=11
gtgatcggccacaggccgctattggcagcgcttgaacggggtcattgcgcttcctatacctttgtcatgaaacgtcgaaacttttttcgtttttccgcacttggcctgctcgctctggcgggcgggggcctttatgcacgccgttcgagcgccagcgcctattatagcggcccgatctccgatcattttgacggagtgcgcttcttcaatcccggcggtacgccgcccggcaatttcatgggccttttgaaatggcgctttaatggcgagcgcgccacatggccggaaacctatccgagcccgtttcccttcgcgaaaccggaagcccggatcgacggcagggatatgcgcgtcaccttcgtcggccatgcctcctttctcatacaaacggcggggctgaatattcttgttgatccggtgtggtcgcagcgcaccagcccgctcagctttgccggccccaagcgggttaacccgccgggcatccgttttgaagacctgccgcccatcgatctggtgctggtgacgcataatcattacgaccatctggatatggaaacgctgaagcgcctgcatgtggcgcataagccgctcttcatcacgccgctcggcaatgacgccgtcatccgcaccggcgttgaggcggcgcgtatcaaggtgggggactggggcgatgtggtggagacgggttcggtgaaaattcacttcgagccctgccatcactggtcggcgcgcggtttgaacgatcggagcatggcactctgggctgccttcgtcatcgaaacgcccggcggcaagatctaccatattggcgataccggcttccacgagggtctcaattacggcgctgctcgcaagaagcatggtgagttccgcctcgccaacctgcccttcggcgcctacgaaccgcgctggtttatgaagggccagcaccagaacccggcagaagccgtagagggtatgaggctttgtggtgcggcgcatgtctgcggccaccattggggtacggtgcagctcaccgatgaggcggtggatgcgccgcttgcggccctcaaggcagcactgacggagcagggggtggaggagagccgttttcggccgatgcgccccggcgaggttttcgacgtgccttccgcctga

SEQ ID NO: 6872 - protein, 378 aa, Agrobacterium tumefaciens str. C58
MIGHRPLLAALERGHCASYTFVMKRRNFFRFSALGLLALAGGGLYARRSSASAYYSGPISDHFDGVRFFNPGGTPPGNFMGLLKWRFNGERATWPETYPSPFPFAKPEARIDGRDMRVTFVGHASFLIQTAGLNILVDPVWSQRTSPLSFAGPKRVNPPGIRFEDLPPIDLVLVTHNHYDHLDMETLKRLHVAHKPLFITPLGNDAVIRTGVEAARIKVGDWGDVVETGSVKIHFEPCHHWSARGLNDRSMALWAAFVIETPGGKIYHIGDTGFHEGLNYGAARKKHGEFRLANLPFGAYEPRWFMKGQHQNPAEAVEGMRLCGAAHVCGHHWGTVQLTDEAVDAPLAALKAALTEQGVEESRFRPMRPGEVFDVPSA

SEQ ID NO: 6873 - DNA, 1071 bp, Caenorhabditis elegans
  CDS (1)..(1071)
atgagcctaccgacaacctcctcaccattaactaacgatcaggaatttgcgaagccggtgaggaatggaaaaatatttgaaaacccgaaatccttcaccaactggggtggtcgcccgggactcactaatatcttcaaacttgttttaagggaaaccagccatgagaatctaccgagcgacaagaaggttctagacagtacacttccggtgcacaacatcactgcagatgatttccacagtgaaagtggcctatttgcgacatggcttggacacgctacggtactagtcgatttggaaggtgtaaagtttgtgacggacccagtttgggctgatcgagcgtcgtttacgagttttgctggaccgaagagatacaggccaccaccgatgaagttggaggatctgccggatttggattttgcagtggtgtcgcatgatcactacgatcatttggatgcggacgcggtgaagaggatcacaaacctgaaccctcaaatcaagtggttcgtcccgctgggattaaagaaatggatgaagaaccaaggcatcggagccgacggatccaacaccgtgaccgagctcaactggggagagagctcggaattcgtgaagaacgggaagaccatcacaatctggtgcctccctgctcaacattcgggacaacgtggactttccgatcataaccaccggttatggtcaggatgggcggtgatcggcgagaatcggagattctactttcccggagatactgggttctgtgacgtcgagtttaagaaaatcggcgagaagcttggacccttcgacctggcagctattccaattggagcctacgagcccagatggttcatgaaatcacatcatatcaatccagatgaagcagtggaagttcataagctcgtcagggctaggaatagcattggaattcattggggcacatatccaatggggacaacagagtactacctggagccacgtgacaagctcaaagagctgatggatgctcgggaggatctgaaggacacgagttttgtcacagttgatatgggcgaaatttgggaggcgtcggatcggtga

SEQ ID NO: 6874 - protein, 356 aa, Caenorhabditis elegans
MSLPTTSSPLTNDQEFAKPVRNGKIFENPKSFTNWGGRPGLTNIFKLVLRETSHENLPSDKKVLDSTLPVHNITADDFHSESGLFATWLGHATVLVDLEGVKFVTDPVWADRASFTSFAGPKRYRPPPMKLEDLPDLDFAVVSHDHYDHLDADAVKRITNLNPQIKWFVPLGLKKWMKNQGIGADGSNTVTELNWGESSEFVKNGKTITIWCLPAQHSGQRGLSDHNHRLWSGWAVIGENRRFYFPGDTGFCDVEFKKIGEKLGPFDLAAIPIGAYEPRWFMKSHHINPDEAVEVHKLVRARNSIGIHWGTYPMGTTEYYLEPRDKLKELMDAREDLKDTSFVTVDMGEIWEASDR

SEQ ID NO: 6875 - DNA, 1089 bp, Ralstonia solanacearum GMI1000
  CDS (1)..(1089): transl_table=11
atgccgctgtgcaacgctgcttcccctctgcctttcgccgcttcggagacgcccgccgctcccgggctggacggcaaattccgcaacgcggtcagcaagccccggcaaggcttctggcaagggctcggcctgatgtggaccttcttcttcaagcggccggcggacacggtgccggatcgcgcgctgccgacgcagcccctgacgcgcgaccaactgctgcaggcgcccgaccgcacgctgttccgcctgggccactcgacggtgctgctcaagctgcggggccgcttctggctcacggatccggtcttctcggagcgcgcctcgccggtgcagtggatcggaccgaagcgcttccacgcgccgcccatcgcgcttgcggacctgcccgacatcgagggcgtgatcctctcgcatgaccactacgaccatctcgaccgcgacaccgtccgggcactcgcgccccgggtgaagcacttcctcacgcccctgggcgtcggcgatcggctcatcgactggggcgtggccgcggacaaggtgcggcagctcaactggtggcagaccaccacggtcggcggtctgcaattcacggcgacgcccgcgcagcatttctcgggccgtacgctgtccgacggcaaccgcacgctgtgggcgtcgtgggtgctgatcgacgatgacctgcgcctcttcttcagcggtgacaccggctatttccccggcttcaaggccatcggggatcgcttcggccccttcgacctgacgttgatggagaccggcgcgtacgacccgcgctggtcctacgtgcacatgctgccggagcagaccctgcaggcccacctggatctgcgcggacggcggctcgtgccgatccacaatggcaccttcgatctggcgctccatccctggcaggagccgttcgagcgaatcctctcggcggcgcgggcgcatgacgtcgaggtggtcacgccgatgatcggcgcggcgctcgacattgtccggccggccgcgacgccggcctggtggcggcctcagcccgaaacgccgcggggcgcggtcacgccgtccctggccgcgggccacgccggcgactga

SEQ ID NO: 6876 - protein, 362 aa, Ralstonia solanacearum GMI1000
MPLCNAASPLPFAASETPAAPGLDGKFRNAVSKPRQGFWQGLGLMWTFFFKRPADTVPDRALPTQPLTRDQLLQAPDRTLFRLGHSTVLLKLRGRFWLTDPVFSERASPVQWIGPKRFHAPPIALADLPDIEGVILSHDHYDHLDRDTVRALAPRVKHFLTPLGVGDRLIDWGVAADKVRQLNWWQTTTVGGLQFTATPAQHFSGRTLSDGNRTLWASWVLIDDDLRLFFSGDTGYFPGFKAIGDRFGPFDLTLMETGAYDPRWSYVHMLPEQTLQAHLDLRGRRLVPIHNGTFDLALHPWQEPFERILSAARAHDVEVVTPMIGAALDIVRPAATPAWWRPQPETPRGAVTPSLAAGHAGD

SEQ ID NO: 6877 - DNA, 1089 bp, Ralstonia solanacearum GMI1000
  CDS (1)..(1089): transl_table=11
atgaagaaccccgattacgagccgtccaagccccaccacacccccgacggcttccgcaaccgctacccccacgccccccgcgacagcaacggcagcgcctggaaatggatgcgcgagcgccgccgcctcggcctgcccaagccgcccaccgccgacctgtcctgcgtgccgcccgatctggcggccatccgccggccgagcgccgtgccccaggtgacctggatcggccacgagaccctgctgctgcagatcgacggcctgaacgtgctgaccgatccggtgttcggcgagcgcgcctcgccgctgccgttcgccggcccgcgccggcaccagccgccggggctgtcgctcgcgcaactgccgcacatcgatctggtgctgctctcgcacaaccactacgaccacctctgccgcgccagcgtgcgcgcgctgatgcggcagccgggcggcgcgccgatgttcttcgtgccgctgggcatcgaccgctggttcaagcgccacgtgcgcggcacgcgcctgtcgggcgagcacgtcaacgtgcgcgccttcgactgggacaccgaagcgcgcttcggcccgttcagcgtgcatttctgcgccgtgcagcactggtccgcgcgcgggctgtacgaccgcaaccgcacgctgtggggcagctgggcgctgctgcatccgcagctgcgcttctggttttccggagacctcggctattcgcaggacacccgcgacatcggggcccgcttcggccacttcgacgtggcggcgatcgccgtgggtgcctacgagccgcgctggttcatgaagacgcagcacatcgacccggccgaggcggtgcaggtgatgcaggatatcggcgcgcggcatgcggtcggcatccactggggcacctttcccctgaccgacgagccgctcgaccagcccatcgccgacctggccaacgcgctgcgcgcgcgcgacatcgacgccgagcgcttcgtcctgttccgccacggcgagacgcgcgtgtgggacgcccaggcagcacgcctgctgaccccggccgagcaacaaaaagcgcggccgcgagtcgactcgctggccgcgcagtag

SEQ ID NO: 6878 - protein, 362 aa, Ralstonia solanacearum GMI1000
MKNPDYEPSKPHHTPDGFRNRYPHAPRDSNGSAWKWMRERRRLGLPKPPTADLSCVPPDLAAIRRPSAVPQVTWIGHETLLLQIDGLNVLTDPVFGERASPLPFAGPRRHQPPGLSLAQLPHIDLVLLSHNHYDHLCRASVRALMRQPGGAPMFFVPLGIDRWFKRHVRGTRLSGEHVNVRAFDWDTEARFGPFSVHFCAVQHWSARGLYDRNRTLWGSWALLHPQLRFWFSGDLGYSQDTRDIGARFGHFDVAAIAVGAYEPRWFMKTQHIDPAEAVQVMQDIGARHAVGIHWGTFPLTDEPLDQPIADLANALRARDIDAERFVLFRHGETRVWDAQAARLLTPAEQQKARPRVDSLAAQ

SEQ ID NO: 6879 - DNA, 1071 bp, Agrobacterium tumefaciens str. C58
  CDS (1)..(1071): transl_table=11
atgaaacgtcgaaacttttttcgtttttccgcacttggcctgctcgctctggcgggcgggggcctttatgcacgccgttcgagcgccagcgcctattatagcggcccgatctccgatcattttgacggagtgcgcttcttcaatcccggcggtacgccgcccggcaatttcatgggccttttgaaatggcgctttaatggcgagcgcgccacatggccggaaacctatccgagcccgtttcccttcgcgaaaccggaagcccggatcgacggcagggatatgcgcgtcaccttcgtcggccatgcctcctttctcatacaaacggcggggctgaatattcttgttgatccggtgtggtcgcagcgcaccagcccgctcagctttgccggccccaagcgggttaacccgccgggcatccgttttgaagacctgccgcccatcgatctggtgctggtgacgcataatcattacgaccatctggatatggaaacgctgaagcgcctgcatgtggcgcataagccgctcttcatcacgccgctcggcaatgacgccgtcatccgcaccggcgttgaggcggcgcgtatcaaggtgggggactggggcgatgtggtggagacgggttcggtgaaaattcacttcgagccctgccatcactggtcggcgcgcggtttgaacgatcggagcatggcactctgggctgccttcgtcatcgaaacgcccggcggcaagatctaccatattggcgataccggcttccacgagggtctcaattacggcgctgctcgcaagaagcatggtgagttccgcctcgccaacctgcccttcggcgcctacgaaccgcgctggtttatgaagggccagcaccagaacccggcagaagccgtagagggtatgaggctttgtggtgcggcgcatgtctgcggccaccattggggtacggtgcagctcaccgatgaggcggtggatgcgccgcttgcggccctcaaggcagcactgacggagcagggggtggaggagagccgttttcggccgatgcgccccggcgaggttttcgacgtgccttccgcctga

SEQ ID NO: 6880 - protein, 356 aa, Agrobacterium tumefaciens str. C58
MKRRNFFRFSALGLLALAGGGLYARRSSASAYYSGPISDHFDGVRFFNPGGTPPGNFMGLLKWRFNGERATWPETYPSPFPFAKPEARIDGRDMRVTFVGHASFLIQTAGLNILVDPVWSQRTSPLSFAGPKRVNPPGIRFEDLPPIDLVLVTHNHYDHLDMETLKRLHVAHKPLFITPLGNDAVIRTGVEAARIKVGDWGDVVETGSVKIHFEPCHHWSARGLNDRSMALWAAFVIETPGGKIYHIGDTGFHEGLNYGAARKKHGEFRLANLPFGAYEPRWFMKGQHQNPAEAVEGMRLCGAAHVCGHHWGTVQLTDEAVDAPLAALKAALTEQGVEESRFRPMRPGEVFDVPSA

SEQ ID NO: 6881 - DNA, 1122 bp, Methanosarcina acetivorans C2A
  CDS (1)..(1122): transl_table=11
atcaagaaagctgcagcatacacattctgctttttgcttctatcgggtgttggaattatcctattcatggacatacaccctgctttcggcgggattccaacgacagaacaaaaagaagcttatcgggaattagataattatgttgatggcaattttgttaatgatgtaccaacaaggagggcatttgtagatccttcagatactacatcgacaaccaacacttctgcttctgaagttaaagaccgcaatcctgtaagcccaattcctgtttatgttattgactggaacaaaataaacagtgaaaacgatagtttgacatggttcggacactctgcttttctgcttaacgtagataataaacagttactgatagaccctatgttgggccctgttgtctcaccggtctcatttgtgggaagaaacagatatgaatacagtgaagatatcatgctgcatctcattgatgaaatgccaccaatcgatgcagttcttattacacatgaccattatgatcacttggattaccggtccattgtaaagctaaataacaaagtatcgcatttctttgttcctcttgggtgtagtgctcatctgatccgatggggtattccggaagaaaaaattacggaactcaactggtgggaagaaacggagtatcagggtttgactgttgctttgacgccatccaggcacagctcaggaagaaatccattcaatatcgataccacactctggggaggctgggtcatcctgggaaataagacccgggtgtataccagtggggacagcggatacggtccacattttaagcaaatcggagacaaatacggaccttttgatataaccctgatcgaaggtgcccaatatgaccgtaattggccggatctccatatggtacctgaacaagctatccaggctaatctggatgtaggtggtaagacaatgatgctgatgcattggggagcatttacattggctaatcatgcctggaatgaaccaatagaaagggcattaaaagaggcaaaaataagagaagtgaatataatcgctccaatgatcggcgagacagtcctgttagattcagacctgcaaacgtctccaacttcgtggtgggatttctga

SEQ ID NO: 6882 - protein, 373 aa, Methanosarcina acetivorans C2A
MKKAAAYTFCFLLLSGVGIILFMDIHPAFGGIPTTEQKEAYRELDNYVDGNFVNDVPTRRAFVDPSDTTSTTNTSASEVKDRNPVSPIPVYVIDWNKINSENDSLTWFGHSAFLLNVDNKQLLIDPMLGPVVSPVSFVGRNRYEYSEDIMLHLIDEMPPIDAVLITHDHYDHLDYRSIVKLNNKVSHFFVPLGCSAHLIRWGIPEEKITELNWWEETEYQGLTVALTPSRHSSGRNPFNIDTTLWGGWVILGNKTRVYTSGDSGYGPHFKQIGDKYGPFDITLIEGAQYDRNWPDLHMVPEQAIQANLDVGGKTMMLMHWGAFTLANHAWNEPIERALKEAKIREVNIIAPMIGETVLLDSDLQTSPTSWWDF

SEQ ID NO: 6883 - DNA, 1185 bp, Methanosarcina acetivorans C2A
  CDS (1)..(1185): transl_table=11
ttggagctatacatggtgtttagaaaaattagagttcttgtggttgaaagagcaaaaataattaaactcaaaaagatcgtgttacatttcttattctttttacttctgttttgtgcagctcttatattatttataaacatagacccggctttcggtgggcatccaacaaaagaacaaacagaaatgtatcaacatttaaataattatgttgatgggaaatttattaatgaggatcctacagagttggttataaattcctcagacgcttcatcaacggatgaggattctgcttcagaggctaaagaccgcaatccgaccggcccaattccggtttctgctattgactggaacaaaattaaaagtgaaaatgatagcctgacctggtttggacactctgcttttctgcttagcattgataataaaaagctattgatagaccctatgttgagtcctattgcctcgccggtttcatttgtgggaattaaaagatatgaatatagtgaagatattatgctgcatcttattgatgaaatgctgcctattgatgcagtttttattacacatgatcattatgaccacttagactatcaatctattgtaaaactagacagcaaagtatcacatttctttgttcctcttggggttagtgctcatctggttcgatggggtattccggaaggaaaaattactgaactcaattggtgggaggaaacggagtatcagggattaaccgttgctttgacaccagccagacatttctccggaagagatccgtttaatattgatactaccctatggggtggatgggtcattcttggaaataacactcgattatatactagcggagacaccggatacgacatccattttaaggaaataggaaaggagtacggaccttttgatatcaccttaatcgaaggtgcccaatatgatccgagctggtcggatattcatatggtaccagaacaatctgtccaggccaatttggatgtaaatggtgagaccatgatgttgatgcattggggagcatttacattagctaatcatggttggaatgagccaatagaaagggcgctggaagaagcaaacgaaagagaagtgaacataattgctcctcaaatcggtgaaactgttctattggattcagacctgcaaatgcctctaacttcatggtgggatttctga

SEQ ID NO: 6884 - protein, 394 aa, Methanosarcina acetivorans C2A
MELYMVFRKIRVLVVERAKIIKLKKIVLHFLFFLLLFCAALILFINIDPAFGGHPTKEQTEMYQHLNNYVDGKFINEDPTELVINSSDASSTDEDSASEAKDRNPTGPIPVSAIDWNKIKSENDSLTWFGHSAFLLSIDNKKLLIDPMLSPIASPVSFVGIKRYEYSEDIMLHLIDEMLPIDAVFITHDHYDHLDYQSIVKLDSKVSHFFVPLGVSAHLVRWGIPEGKITELNWWEETEYQGLTVALTPARHFSGRDPFNIDTTLWGGWVILGNNTRLYTSGDTGYDIHFKEIGKEYGPFDITLIEGAQYDPSWSDIHMVPEQSVQANLDVNGETMMLMHWGAFTLANHGWNEPIERALEEANEREVNIIAPQIGETVLLDSDLQMPLTSWWDF

SEQ ID NO: 6885 - DNA, 1041 bp, Streptomyces coelicolor A3(2)
  CDS (1)..(1041): transl_table=11
atgacgcagcagccccggtcgaccgcgcgcacccccgcctccgccgaggaccccgccgcggccgccgcccacccgccgctcgccgccccccggccgccggccgagcaccgggtgtggccgcggaccttccacgaccggctgaccgcaccgctgcccggtctgaaggccttcgccagattcgcccgcgagggggcggtcagacccggcccggccggactcgccgacgtcccccggctgccgtgcgcacccggcccgctgccccgggtggacgcgcgcaccgtcgccgtcacctgggccggacacgccagctgggtggtgcggatcggtggcctcaccgtgctcaccgacccggtctggtcccgccggatcctcggcaccccgccccgggtcacgcccgtcggcgtcccctggagcgccctgccccgcgtcgacgccgtcgtcatcagccacaaccactacgaccacctggacgcgcccaccttgcgccggctcccgcgcgacacccccgtactcgtcccggccggtctgggccgctggttccaccgccgccgcttcacccacgtcaccgagctggactggtgggaggcgaccgagctgaacggggtccggttcgacttcgtcccggcccaccactggtccaagcgctccctgaccgacacctgccgcaccctgtggggcggctgggtgctcaccgaccccgacggccgccgcgtctacttcgccggtgacaccgggtacggccactggttcacccggatcggccgccgctaccccggcatcgacctcgcgctgctccccatcggcgcctacgacccgcgctggtggctcagcgacgtgcactgcgatccggaggaggcggtgcgggccgcccaggacgtcggcgcgcgccgcatggcgccgatgcactggggcacgttcgtgctctccgcggagccggtactggaacccctcgcccgcgtacgcgccgcctggcagcaggcgggcctgccccgcgaacgcctgtgggacctgccgatcggcgcctcccgcgtgctggagtga

SEQ ID NO: 6886 - protein, 346 aa, Streptomyces coelicolor A3(2)
MTQQPRSTARTPASAEDPAAAAAHPPLAAPRPPAEHRVWPRTFHDRLTAPLPGLKAFARFAREGAVRPGPAGLADVPRLPCAPGPLPRVDARTVAVTWAGHASWVVRIGGLTVLTDPVWSRRILGTPPRVTPVGVPWSALPRVDAVVISHNHYDHLDAPTLRRLPRDTPVLVPAGLGRWFHRRRFTHVTELDWWEATELNGVRFDFVPAHHWSKRSLTDTCRTLWGGWVLTDPDGRRVYFAGDTGYGHWFTRIGRRYPGIDLALLPIGAYDPRWWLSDVHCDPEEAVRAAQDVGARRMAPMHWGTFVLSAEPVLEPLARVRAAWQQAGLPRERLWDLPIGASRVLE

SEQ ID NO: 6887 - DNA, 768 bp, Streptomyces coelicolor A3(2)
  CDS (1)..(768): transl_table=11
gtggagctcacgtggtggggtcacgccacctgcacggtcgaggattcgggcatccgcgtgctcaccgatcccctgttcgtccgccggctggcccatctgcgtcgcaggcggggcgcggtcccgccgcccgaggcgtggcgcgcggacgtggcgctggtctcccatctgcacgccgaccacctgcacgtgccgtcgctcgcgcggctcgcgccgggcacgcgcctgctcgtgccccggggcgcacgccgggcggtgccggggctgcggcggctcggtcacctggagctgaccgaggtggtgccgggtgacgagacgaccgtcggtgacctgcgcatacgggcggtcccggcgcggcacgacgggcggcggctgccggtcggacggcaccgcgcccccgcgctcggctacgtcgtcgagggcgaggcgcggacgtacttcgccggggacaccgggctgttcgacggcatggagcaggaggtcgggccggtcgacgcggcgctgctgccggtgggcggctggggcccctacctgggtgcggaacacctggacgcggggcgggcggccgaggcactggcccggctggcgccgcgcacggcggtgccggtgcactacggcacgtactggccgatcgggatggacgccgtgcgcccccacgagttccacacgccgggcgaggagttcgtgcgcctgtcggcgctgcgcgcgccgggcgtggcggtgcaccggctggggcacggcgagagtgtgcgggtggaggtcgcgcggtga

SEQ ID NO: 6888 - protein, 255 aa, Streptomyces coelicolor A3(2)
MELTWWGHATCTVEDSGIRVLTDPLFVRRLAHLRRRRGAVPPPEAWRADVALVSHLHADHLHVPSLARLAPGTRLLVPRGARRAVPGLRRLGHLELTEVVPGDETTVGDLRIRAVPARHDGRRLPVGRHRAPALGYVVEGEARTYFAGDTGLFDGMEQEVGPVDAALLPVGGWGPYLGAEHLDAGRAAEALARLAPRTAVPVHYGTYWPIGMDAVRPHEFHTPGEEFVRLSALRAPGVAVHRLGHGESVRVEVAR

SEQ ID NO: 6889 - DNA, 1113 bp, Streptomyces coelicolor A3(2)
  CDS (1)..(1113): transl_table=11
atggcgcgcatccgcagatcgccgcacttccgcgacggcgtcttccagaaccccggaggcacggcacggacccggccctccggatcggccgccgaattcgccaagatctacttcaacaaggaggcgcggctgcgccggtccccgcagggaccggtcccggtacacgccaccaccctggccgacctcgcccggccgcccgccaccgggctccggctgacctggatgggccactccagcgtgctcgccgagatcgacgggcagcgcgtgctcttcgacccggtgtggggcgagcgctgctcccccttccccttcgccggccccaagcgcctgcatcaggtcccgctgccactggccgccctgggcccggtcgacgtggtcgtcatctcccacgaccactacgaccacctggacatgcccaccatcaaggcactggccggcacggacaccgtgttcgccgtgccgctcggcgtcggcggccacctcgaacactggggtgtctcccccgaccggctgcgcgagctggactggcacgagtcgacgcgcgtcggcggcctcaccctcaccgccaccccggcccggcacttctgcgggcgcgggctgcgcaacacccagcacaccctctgggcgtcctgggtcgtcgccggtgccgagcaccgcgtgtaccacagcggggacaccggctacttcgacggattccgcgacatcggcgccgcgcacggccccttcgacgccacgatgatccagctcggggcgtacgccgagttctggccggacatccacatgacgcccgaggagggcgtccgtgcccacctcgacctccagggcggcggtccgcacggcgccctgctgccgatccactggggcaccttcaacctggcgccgcacgcgtgggcggagccgggggagtggacgaaggacgcggccgaggaggccggtcagccggtggcgttcccgcggccgggggagccgttcgagccggcgggggagctgccgggggaggcgtggtggcgggcggtctcccagccgatcgcccacccgtggcggcgcctcgagaccgctcgcagtgcggccgggaagagcaggagcgagctcgggctcgcgggcgagggctga

SEQ ID NO: 6890 - protein, 370 aa, Streptomyces coelicolor A3(2)
MARIRRSPHFRDGVFQNPGGTARTRPSGSAAEFAKIYFNKEARLRRSPQGPVPVHATTLADLARPPATGLRLTWMGHSSVLAEIDGQRVLFDPVWGERCSPFPFAGPKRLHQVPLPLAALGPVDVVVISHDHYDHLDMPTIKALAGTDTVFAVPLGVGGHLEHWGVSPDRLRELDWHESTRVGGLTLTATPARHFCGRGLRNTQHTLWASWVVAGAEHRVYHSGDTGYFDGFRDIGAAHGPFDATMIQLGAYAEFWPDIHMTPEEGVRAHLDLQGGGPHGALLPIHWGTFNLAPHAWAEPGEWTKDAAEEAGQPVAFPRPGEPFEPAGELPGEAWWRAVSQPIAHPWRRLETARSAAGKSRSELGLAGEG

SEQ ID NO: 6891 - DNA, 1029 bp, Yersinia pestis KIM
  CDS (1)..(1029): transl_table=11
atgttggctgcaacagcggttggcagtaaaggacgtaaaatggcgaagaaaaacccctattatgatgccagcaagccacatcacacagagtttggatttcagaatatagaaccggttgttcatcatccgcaggatttgaaacgctggcgtgaagagagaaagcgccagtcgctgcctaagccgcctcagcagggctacccgcagttcgttacagattggtggcaacaagctgacttttcagggctgcaagatgcgttgtggtggcttggtcatgcttcattattgttacgtatcagtgggcaggcagtgttgtttgaccctgtgctttcaagccgggtttcaccggttaatttttatggcccacagcgcaaaacaccaatacccgccagcgtacagcaactgcccgatattgatgtgatcgtgatctctcataatcattacgatcacttggatgtcacgactatcacgcaattattgcgccgtttccctgacgtggtgtttttggtcccattagggctgaaaaactggttgcggcagcatggtgctcgccatgttcatgagttggattggtgggatcaacggctcgtcgctgactttgagttccattgtgtgcccgcccgtcattggagtatgcgcactccttgggatcggaatcacagtttgtggtctggctgggtagtgaagcggggcgaagttaacttttatttcagtggtgatactggctattgccagcaattactggatatcggtgaggcactggggccattcaattatgcggcactgccaattggtgcttatgcaccacgctggtttatgcaggcgcaacatatggatccacaacaatcggtgcaattgtttcaaaaattacaccaaccggtgacgatcccgattcattggggggtctttgaactggctgatgagccattggatgaaccaccagaacaacttcaacaggcgttaaccgatgccggagtggcgcacaataaattcgtaccaattaaaataggtgcacggatcatactggaatag

SEQ ID NO: 6892 - protein, 342 aa, Yersinia pestis KIM
MLAATAVGSKGRKMAKKNPYYDASKPHHTEFGFQNIEPVVHHPQDLKRWREERKRQSLPKPPQQGYPQFVTDWWQQADFSGLQDALWWLGHASLLLRISGQAVLFDPVLSSRVSPVNFYGPQRKTPIPASVQQLPDIDVIVISHNHYDHLDVTTITQLLRRFPDVVFLVPLGLKNWLRQHGARHVHELDWWDQRLVADFEFHCVPARHWSMRTPWDRNHSLWSGWVVKRGEVNFYFSGDTGYCQQLLDIGEALGPFNYAALPIGAYAPRWFMQAQHMDPQQSVQLFQKLHQPVTIPIHWGVFELADEPLDEPPEQLQQALTDAGVAHNKFVPIKIGARIILE

SEQ ID NO: 6893 - DNA, 1272 bp, Plasmodium falciparum 3D7
  CDS (1)..(1272)
atgaagagtataataaacacatttttaccttattataagcataacaacaatttaacattaaacgtaacactaaaaaataaagtaaggtttttatttttttatctagatcgttttgtgtattctccaatacttcaaatattgttaagaaaccaaaatgttaaggaacaaaatgtaatcaaaaaaatatataaactgaaaattttaaacaaattgcctctacaatttaaaaaggataaaaatgatgaaaaacatcatgtgaaaaatcaaaaatatattaataaaaattctttcgaatgtaaggaaaaaatgaatgataaaattcgtaatataaaaaatgataaaataaattattatgaccatatagaaataaatgctttatggccggaaagaatatcttacgtacaaccttttgaagtaaaaaaaaatttagaaaaggataaatttaatgttatatatataggacatatgagtatcttaatacaaacatccaaatataatatattaatagatcctgtattatcaaatagaattggtttttgtaatattttaggggtcaaaagaataataaaaccaggtataaactttgaacatttacctagtattgattttatattattaagtaataatagatatgataccatggataaaacaacattaaaaaatataatattaagagataatagtattgttattggaggtatgaatataagaagatatttattgaaaaggaatttcccagttgtttatcctttaaattggtttaataaattaagttttgaaaatatatctttttattatttaccaaccttaacaaatagtcatagatttcttgttgataaaaatgtatacctaccaggctctttcttaattcatgattcatccacaaacgccacaattttttatagtggacattctggttattccaatcactttttacaaattaaaaactatgttaataatgttgtactcaaaaggaataatcatatagatttatctatattgcctattggtatatacaaacctgactctttgtacaataattttcacatgtccccacgcgaagccttgcaggtgagtatacataaaaatagccattttgatttaggtagtaaacaatccttaggaattggaactgacgttttttgcttaggtggagaagaatataaagaagccacaaaagaattgactcatatattagattcttatcaaaagaaaaataataataaaattacttttgttacattacaaccaggggaaaattttattatataa

SEQ ID NO: 6894 - protein, 423 aa, Plasmodium falciparum 3D7
MKSIINTFLPYYKHNNNLTLNVTLKNKVRFLFFYLDRFVYSPILQILLRNQNVKEQNVIKKIYKLKILNKLPLQFKKDKNDEKHHVKNQKYINKNSFECKEKMNDKIRNIKNDKINYYDHIEINALWPERISYVQPFEVKKNLEKDKFNVIYIGHMSILIQTSKYNILIDPVLSNRIGFCNILGVKRIIKPGINFEHLPSIDFILLSNNRYDTMDKTTLKNIILRDNSIVIGGMNIRRYLLKRNFPVVYPLNWFNKLSFENISFYYLPTLTNSHRFLVDKNVYLPGSFLIHDSSTNATIFYSGHSGYSNHFLQIKNYVNNVVLKRNNHIDLSILPIGIYKPDSLYNNFHMSPREALQVSIHKNSHFDLGSKQSLGIGTDVFCLGGEEYKEATKELTHILDSYQKKNNNKITFVTLQPGENFII

SEQ ID NO: 6895 - DNA, 1044 bp, Leptospira interrogans serovar Lai str. 56601
  CDS (1)..(1044): transl_table=11
atgaaacatattttcctttttattattttattatttctttttgaaacctgttttccaatcgatccagagagaattcgttcttctcattttcaggatggaaagtatcacaatattgaagaagatgtaagactgaataaaaattttttttcggtcttacgttggaaaattttaggacctaaggatccgcctacagtagagggagatctggaaaaaattccggatgtaatccctataaaaaaagaggatttacttgctcccgagggtaaagtgagaattgtctggcttggacatgcaacggtatggatcgcttctaattttcacggtaaaagaatgcacattcttacagatccgatatttactggagttcctccttttgttaagcgacttactaaacttccgatcgaaccagaaaatcttcccggagtggacattgtagtgattagccacgcgcacagagatcatttggatatagattcgattcaaaagatacaaaagttatttccggaagttacagttcatcttccttctggaatgggtgaatttgcaagggacgaaggacttgaaaatgcggtaatacaagagtggtggacgattacagaatatgcgggaaccaaaattcactttcttcccgcaaaacactggagcagaatgggacttaccgatatgaatcaatatcattggggaagttacgcattcgaatttgagaatattagaatatactttggtggtgatactggattttcaaaacacttttcggaaattgggaaacgttttgcccagggattttcagcgaccatacttcccataggagcgtttaaacctagatggtttatggaacctgctcatataggacccaaggaagcattagaggcaagttctattcttcattcttctttgatccttccggttcattgggggacattcgcgcttggagacgaccttccttcggaggctccactttatcttaaaaaattacattctgagaaaaaagataagttaccggctctacgagtttggacgatgggtgaaattgtagatttgtga

SEQ ID NO: 6896 - protein, 347 aa, Leptospira interrogans serovar Lai str. 56601
MKHIFLFIILLFLFETCFPIDPERIRSSHFQDGKYHNIEEDVRLNKNFFSVLRWKILGPKDPPTVEGDLEKIPDVIPIKKEDLLAPEGKVRIVWLGHATVWIASNFHGKRMHILTDPIFTGVPPFVKRLTKLPIEPENLPGVDIVVISHAHRDHLDIDSIQKIQKLFPEVTVHLPSGMGEFARDEGLENAVIQEWWTITEYAGTKIHFLPAKHWSRMGLTDMNQYHWGSYAFEFENIRIYFGGDTGFSKHFSEIGKRFAQGFSATILPIGAFKPRWFMEPAHIGPKEALEASSILHSSLILPVHWGTFALGDDLPSEAPLYLKKLHSEKKDKLPALRVWTMGEIVDL

SEQ ID NO: 6897 - DNA, 1131 bp, Caenorhabditis elegans
  CDS (1)..(1131)
atgtttgttccggttgtcatgacaattgtcctcctcctctacgccacaagcgactccgtggtaatgagcgcgccgacgacctcatcctccaccgacgaggactttgcgaagcccgtgaagaatggaaaaaccttcgcaaaccccaaatcctttaccaactggggtggtattccgggaatcagtgatggattcaaatttgcattcaccgaaactaaccacgaaaatgtgccatgtgacaagaagattcttgacgtcgagattccggtgcacaacatcaccgcagatgatttccacagtgaaagtgatctatttgcgacgtggcttggacacgctacggtactagtcgatttggaaggtgtaaagtttgtgacggacccagtttgggctgatcgagcgtcgtttacgagttttgctggaccgaagagatacaggccaccaccgatgaagttggaggatctgccggatttggattttgcagtggtgtcgcatgatcattacgatcatttggatgctgacgcggtgaagaagatcacagatcgcaacccccaaatcaagtggttcgttccgctgggaatgaagaaatggatggaaggccagggcatcggagtcgacggatcctccaccgctgtcaccgagctcaactggggagagagctcagaatttgtgaagaacggaaagacctacaccatctggtgtctgcctgctcaacactggggacagcgtggacttttcgaccggaaccacagattatggtcaggctgggcggtgatcggcgagaatcggcgattctattattccggagatactggtcactgtgacggagagtttaagaagtttggcgagaagcttggaccttttgatctggcagctattccaattggagcatacgagcccagatggttcatgaaatcccagcatatcaatccggaagaggcgattgaggttcataaactcattcgggctaagaacagtattggaatacactggggaacgtaccatatgggctctactgagtactacctggagccacgtgacaagctcaaagagcttatggatgctcgggaagatcttaagaacacgagttttgtcacaattgaaatgggtcgaatttgggaggcgtcggatcagtga

SEQ ID NO: 6898 - protein, 376 aa, Caenorhabditis elegans
MFVPVVMTIVLLLYATSDSVVMSAPTTSSSTDEDFAKPVKNGKTFANPKSFTNWGGIPGISDGFKFAFTETNHENVPCDKKILDVEIPVHNITADDFHSESDLFATWLGHATVLVDLEGVKFVTDPVWADRASFTSFAGPKRYRPPPMKLEDLPDLDFAVVSHDHYDHLDADAVKKITDRNPQIKWFVPLGMKKWMEGQGIGVDGSSTAVTELNWGESSEFVKNGKTYTIWCLPAQHWGQRGLFDRNHRLWSGWAVIGENRRFYYSGDTGHCDGEFKKFGEKLGPFDLAAIPIGAYEPRWFMKSQHINPEEAIEVHKLIRAKNSIGIHWGTYHMGSTEYYLEPRDKLKELMDAREDLKNTSFVTIEMGRIWEASDQ

SEQ ID NO: 6899 - DNA, 1074 bp, Vibrio vulnificus CMCP6
  CDS (1)..(1074): transl_table=11
atgaacaaacgacttatcaaaatcacttttttgactgtgttaggagctattgccatgagttcgatcttcaccgcctgctcgactgctgaggcagagaaatccctttatccaaagacatttcgtaatagtgaccccaatttcaatggcggttctgacctctttgaaatcgtcaaagcgtacttcacgacgaaacgagctttaccgaaacccacatttgcactgccagtgcatagcatcacgacggaacagttgcttgaggagcagcaagatgtgctctatcgtcttggtcactcaagtgtgctgatgaagttggacggtcaattggtaatgacggatccggtattcagtaaacgcgcctcacctgtacagttttttggccctgcccgctttcacccaactccaattgagctcgatgggctgccaaacatcgatgtggttctcattagtcatgaccactatgatcatctcgacaaaaacacggtcaaaaccctggcgagcaaagtgggcgtttttcttgtgccattgaaagtgggcgtgatcttgcaagaatggggcgtggacaagcacaaaatcgttgagtttaattggtgggaaagccacgtagtcaacggaactgagtacgtgttcacgcctacccagcacttttcaggccgaggattaaccgacagtaacagcaccttgtggggaagttgggtcattcgtggccgtgagaaaaacctcttcttcagtggtgactctggctactttgatgggttcaaaaccattggggaaaaatacggcccgttcgacctcaccatgatcgaaactggcgcgtacaacagtttgtggtcgaacattcacatgttccctgaagagagcgttcaagcgcatcttgatttgcaaggccagaaaatgatgccgattcacaacagtacctttgatttagcaatgcacgattggcatgaaccgatggaaaaagcgcgacagatcagcgaagaaaaaggcgtgacgatgatcagcccagagattggtcagcgccttgtgcttaatgaagaatcaccactcaaaccctggtggttagaagataacggctaa

SEQ ID NO: 6900 - protein, 357 aa, Vibrio vulnificus CMCP6
MNKRLIKITFLTVLGAIAMSSIFTACSTAEAEKSLYPKTFRNSDPNFNGGSDLFEIVKAYFTTKRALPKPTFALPVHSITTEQLLEEQQDVLYRLGHSSVLMKLDGQLVMTDPVFSKRASPVQFFGPARFHPTPIELDGLPNIDVVLISHDHYDHLDKNTVKTLASKVGVFLVPLKVGVILQEWGVDKHKIVEFNWWESHVVNGTEYVFTPTQHFSGRGLTDSNSTLWGSWVIRGREKNLFFSGDSGYFDGFKTIGEKYGPFDLTMIETGAYNSLWSNIHMFPEESVQAHLDLQGQKMMPIHNSTFDLAMHDWHEPMEKARQISEEKGVTMISPEIGQRLVLNEESPLKPWWLEDNG

SEQ ID NO: 6901 - DNA, 990 bp, Bradyrhizobium japonicum USDA 110
  CDS (1)..(990): transl_table=11
atgtcccgcatgaagacctatgacggtcccgcctccgaccatttcaacggcctgcacttcttcgatcccgacggcgcgccgccgaaaccgcttcgcgaggtgctgcgctggcagttcagcggcaagcggcagcgggcggcctggccggattgggctccgagcccccatgccgacaccccgccggagcgcgtcgacggcggcaaggcgcgactctccttcgtcggtcacgccagttggctgatccaggccggcggcctcaacatcctcgtcgatcccgtctggtcctcgcgggtgtcgcccgtcggctttgccggaccgaagcggcacaacgatcccggcatcgccttcgagaagctgccgaagatcgacgtcgtgctggtctcgcacgggcactacgatcatctcgacatcgcgacgctgtcgcggctcgccaagaattttgctccgcgggtggtcacgccgctcggaaatgacgtgacgatgcgcagcaccgactcgtcgatcaaggccgaggcgttcgactggcacgaccgcgtcgagctcggcggcggcatcgccgtgcatctggttccgacccggcactggacagcgcgcggcctgttcgatcgcaacaaggcgctgtgggcgagttttgtgttggagacgccggccgggaaaatctacgtcgtctgcgattccggctatggcgatggcagacattttcgccgcgtcgcggagaagcacgggccgttacgcctggcgatcctcccgatcggcgcctacgagccgcgctggttcatgcgcgaccagcacatgaatccggaagatgccgtgaaggcgctgctcgattgcggcgcgcaggacgcgctcgggcatcatcacggcactttccagctgacggacgaggcgatcgacgcacctgcgaaagcgctggtcgaggcgctggatgccgcgcagattccgcagcagcggttcgtcgcgatgaagccggggcaggtggtggagatttag

SEQ ID NO: 6902 - protein, 329 aa, Bradyrhizobium japonicum USDA 110
MSRMKTYDGPASDHFNGLHFFDPDGAPPKPLREVLRWQFSGKRQRAAWPDWAPSPHADTPPERVDGGKARLSFVGHASWLIQAGGLNILVDPVWSSRVSPVGFAGPKRHNDPGIAFEKLPKIDVVLVSHGHYDHLDIATLSRLAKNFAPRVVTPLGNDVTMRSTDSSIKAEAFDWHDRVELGGGIAVHLVPTRHWTARGLFDRNKALWASFVLETPAGKIYVVCDSGYGDGRHFRRVAEKHGPLRLAILPIGAYEPRWFMRDQHMNPEDAVKALLDCGAQDALGHHHGTFQLTDEAIDAPAKALVEALDAAQIPQQRFVAMKPGQVVEI

SEQ ID NO: 6903 - DNA, 999 bp, Xylella fastidiosa Temecula1
  CDS (1)..(999): transl_table=11
atgccacataaccgctactatcaaggcccattaagcgaccacttcgacggcctacgcttcttcaatccaggccaacccaacaccgacaaaccattcagcgatctgttgcgctggcgctgggagagtcgccacctgcccccttggcgcgacgtaccacccacccacgtcgctacccccatcgcacgcagccagcaccccatcatcaccatgattggccactccagcgtgctgatacaaattgcaggactcaacctactcgttgaccccgtatggtccgaacgggtcagcccactctcctggttgggtccgcgacgttggaactcccctggtatcgacttcaacgcattaccgcccattgattatgtactcatcacccacaaccactacgatcatctggacctgaccaccctggcacgcctccagatagctcatgccccccaagtggtcaccccactgggcaacgatgccatcatccgcaagcgcgtccctgacctgcatatacacacccttgattggtgggattcaatacaactgacaaacgaacccaccaaaatcagcgtcgtccccgcctaccactggtcggcacgcggcttacgagacaggcgcatggcactgtggggcggcttccacctacacacaccccaagggagcctctacattgctggcgacaccgcctatgggaatggcagcatcttccacgcaatagcgcaacgctgcggtgctccagatctggccatcctgcctatcggcgcctatgcgccacgctggttcatgcacaaccaacacatcaatgccgtagaagccgtgcagattatgtgcgacgtaggcgcacaccaagccttgggagtgcattggggcaccttccgcctgaccgacgaagccgtagaagaaccacctaccctcttagctcaagccctaaaagccaaaggcattcctgcaacccgcttcattgcgatgacacccggtcaaataaatcggtggaaagcttccgaacgctaa

SEQ ID NO: 6904 - protein, 332 aa, Xylella fastidiosa Temecula1
MPHNRYYQGPLSDHFDGLRFFNPGQPNTDKPFSDLLRWRWESRHLPPWRDVPPTHVATPIARSQHPIITMIGHSSVLIQIAGLNLLVDPVWSERVSPLSWLGPRRWNSPGIDFNALPPIDYVLITHNHYDHLDLTTLARLQIAHAPQVVTPLGNDAIIRKRVPDLHIHTLDWWDSIQLTNEPTKISVVPAYHWSARGLRDRRMALWGGFHLHTPQGSLYIAGDTAYGNGSIFHAIAQRCGAPDLAILPIGAYAPRWFMHNQHINAVEAVQIMCDVGAHQALGVHWGTFRLTDEAVEEPPTLLAQALKAKGIPATRFIAMTPGQINRWKASER

SEQ ID NO: 6905 - DNA, 1101 bp, Pseudomonas syringae pv. tomato str. DC3000
  CDS (1)..(1101): transl_table=11
atggcctcgacacacccgaaaaaggatgtctcttcactgcctgtcttgtctcgtcacgaggggcgctatcagaatcacacgcctatgaagccattaggcttttttcgcatgctcggcatcttctgggatcaggcattcaacaaacccagggacacgcgcccggcgggggagattcctgtgcaaccgctgtcgcgtcagcaattgctcgcagcaccgaacaacaccgtgtatcgccttgggcattcgaccgtgctgctcaagttgcgcaaccggttctggctgaccgacccggtgtttgccgagcgtgcttcgccggtgcaatgggccgggccgcagcgctttcatcagccgccgatcagcctggaagaactgccgccgatcactggcgtgatcctctcgcataaccattacgatcatcttgaccatatggccatcaaggcgctggtcgacaagaccgagcacttcctcgcaccgttgggcgtgggtgacaagctgatcgaatggggcgtgcctgcgcacaaggtgcagcaactggactggtggcagtccacagaggtggcgggcataacattcgtcgccacgccttcgcagcatttttcgggccgcaccttgcgcgacagcaaccgcagcttgtgggcctcctgggtgatgatcgatgacgatcagcggatcttcttcagcggtgacagcggctacttcgacggtttcaagaccattggtgagcagtacgggccgtttgacctgaccctgatggaaaccggtgcctacaacgtcgaatggccgcaagtgcacatgcagccagagcagaccctgcaggcccaccttgacctgcgcggtcgctggctgctgccgattcataacggcaccttcgacctggcgatgcacgcctggcacgaaccgttcgaccggattctggccctggcctgggagcagaatgtgtcgatcaccacgccgatgatgggccagccgttctatctgcaatacccgtgtcgcgcaatgacctggtggctgggggtcgatgaagtggtcgcgcccgagtcaactcaggcgcatccggcgagtggcgaacggtcctgtaactgccgtcggcaaaatgcctga

SEQ ID NO: 6906 - protein, 366 aa, Pseudomonas syringae pv. tomato str. DC3000
MASTHPKKDVSSLPVLSRHEGRYQNHTPMKPLGFFRMLGIFWDQAFNKPRDTRPAGEIPVQPLSRQQLLAAPNNTVYRLGHSTVLLKLRNRFWLTDPVFAERASPVQWAGPQRFHQPPISLEELPPITGVILSHNHYDHLDHMAIKALVDKTEHFLAPLGVGDKLIEWGVPAHKVQQLDWWQSTEVAGITFVATPSQHFSGRTLRDSNRSLWASWVMIDDDQRIFFSGDSGYFDGFKTIGEQYGPFDLTLMETGAYNVEWPQVHMQPEQTLQAHLDLRGRWLLPIHNGTFDLAMHAWHEPFDRILALAWEQNVSITTPMMGQPFYLQYPCRAMTWWLGVDEVVAPESTQAHPASGERSCNCRRQNA

SEQ ID NO: 6907 - DNA, 1137 bp, Vibrio parahaemolyticus RIMD 2210633
  CDS (1)..(1137): transl_table=11
atgtctgagacgatacttaagcgcacatacctaacgagtgaacaaaagacacaaaagccagattcactgattccgcctcaaacctaccatgcgcagttggcgcaccgtgttcaccactcgcctcaatttgaaaacggccgcgttaaaaacgagatgccaaatgtccctagtccgcaatcattctggcaggtgtgttggagttatcttggtggtagaacgccgttgagtcctaacgaacatctgccacattccccaattcaacccacgcagtttgcgcagcgaagtgaatcgatgcgccttacttggctgggccattccactatgctggtggaggtcgatggcattcgaattctgaccgatccggtctttgattacgcttctccgttcatcgcaaaagcgtggtttgaacgcaatattcccaatacccatgccagagattgtttgccgattcctgaaattatcgtgatttcgcacgatcattacgaccatttagaagcatcgaccatacgtttctacgccgataaacccgtgacgttttatgtacccttaggggttggcaagcatctgataaagtggggcgtttgcgcagacaacatcgtggaattcgattggtgggatagcgtgcactatgctggaatcgaactgatttgtacgcctgctaaccataattcgggtcgtacttatttcgataaaaacgcgaccctgtgggcttcttgggtcatcaaaggcaaagaagagacgctctattttagtggcgattcagcttacgattcgcacttttccgagatcgcacagcgatgtggaccaatcgacattgcctgtttggaagtggctgccgatgtgaaaggccaaggttatccggtcgaaaactgggggcacatgcaggctcatcataccgtgcaagcgtttcacgatttaaatgcgaaaaaactgttgccagtacattgggctacatacgagctatttactcaccgctgggacgaaccgattttagatttgcttgcccattgtcaaaaagaacacataacgctgctgacgccaatgccgggggagagtttttacgttcatcaagaacatataaataaacagtggtggcgagaaaaagaaatatgtgagccagctagaattttgacttaa

SEQ ID NO: 6908 - protein, 378 aa, Vibrio parahaemolyticus RIMD 2210633
MSETILKRTYLTSEQKTQKPDSLIPPQTYHAQLAHRVHHSPQFENGRVKNEMPNVPSPQSFWQVCWSYLGGRTPLSPNEHLPHSPIQPTQFAQRSESMRLTWLGHSTMLVEVDGIRILTDPVFDYASPFIAKAWFERNIPNTHARDCLPIPEIIVISHDHYDHLEASTIRFYADKPVTFYVPLGVGKHLIKWGVCADNIVEFDWWDSVHYAGIELICTPANHNSGRTYFDKNATLWASWVIKGKEETLYFSGDSAYDSHFSEIAQRCGPIDIACLEVAADVKGQGYPVENWGHMQAHHTVQAFHDLNAKKLLPVHWATYELFTHRWDEPILDLLAHCQKEHITLLTPMPGESFYVHQEHINKQWWREKEICEPARILT

SEQ ID NO: 6909 - DNA, 999 bp, Bacteroides thetaiotaomicron VPI-5482
  CDS (1)..(999): transl_table=11
atgggtgaacatatatgtttcaggagaaacgaacgtttggctaccgttaatccttattggagaggaaatccgatggtacgcggacgtttttttaacaggcagcaccgtttccgccccggtatgggaagtgtgttgaaatggcggttgtcccccaatcctcagcggaaagaaaagaaaacggtgaagtgggacccgaaagtctgttatcttcgttcgctggatgctgtggtgggagattctttaatatggctgggacataattccttcttccttcagttggcaggtaaaagaatcatgttcgatccggttttcggaaacatcccttttgtgaaaagacagagtgagtttcctgccaatcccgacatttttacagaaattgattacctgcttatcagtcatgatcattttgaccatctggacaagcaaagtatcacccgtttgctgaataataatccgcagatgaaattgttttgcggtttgggaaccggagaactgataaagagctggtttccggaaatgagagtgattgaggccggctggtatcagcaactggaagatgaagggctgaaaataactttcttgccggcacagcattggagcaaacgctccgtacgtgatggagggcagcgattgtggggagctttcatgctgcaggggaatggtgtttctctctattatagcggagacacagggtattctacccattttagggaaatcccggatctgttcggagctccggactatgccttgttgggtatcggtgcatataaaccccgttggttcatgcgtcccaatcatatttctccttatgaatcactgactgcctccgaagagatgcacgcaggaataaccattccgatgcactacggtacatttgatttgtctgatgaacccttgcatgatccgcctaaagtatttgcggcagaagcaaagaaaagaaagattcgtgtagaaatcccttatctgggagaaatcgtaaaactgagtaaaagaaagtaa

SEQ ID NO: 6910 - protein, 332 aa, Bacteroides thetaiotaomicron VPI-5482
MGEHICFRRNERLATVNPYWRGNPMVRGRFFNRQHRFRPGMGSVLKWRLSPNPQRKEKKTVKWDPKVCYLRSLDAVVGDSLIWLGHNSFFLQLAGKRIMFDPVFGNIPFVKRQSEFPANPDIFTEIDYLLISHDHFDHLDKQSITRLLNNNPQMKLFCGLGTGELIKSWFPEMRVIEAGWYQQLEDEGLKITFLPAQHWSKRSVRDGGQRLWGAFMLQGNGVSLYYSGDTGYSTHFREIPDLFGAPDYALLGIGAYKPRWFMRPNHISPYESLTASEEMHAGITIPMHYGTFDLSDEPLHDPPKVFAAEAKKRKIRVEIPYLGEIVKLSKRK

SEQ ID NO: 6911 - DNA, 1221 bp, Streptomyces avermitilis MA-4680
  CDS (1)..(1221): transl_table=11
gtgaccggtttccgtctcccgagctccgggctccgcgcagtgcggcccgccgccttcggcgcggatccgagcggtgagcgcctggagcgcatccgcagatcacccaatttcgtggacggctccttcgtgaacccggagggcacccgcacccgccccgccggcggctccacgctggagctggcgaaggtgttcctccgcaaggaggagcgcacccgccgctccccggccggcacggtcccggtgcaccccacgaccttcgccgacctcgccaggcctccggcgagcggactgcggctgacctggatggggcactccagcgtgctcgccgagatcgacggccaccgggtgctcttcgacccggtctggggcgagcgctgttccccgttcgacttcgtcgggcccaagcggctgcaccccgtgccgctgccgctggccgccctcggcccggtcgacgtcgtcgtcatctcccacgaccactacgaccacctggacctgcccacgatcaaggccctggccggtacggacacggtcttcgcggtgccgctcggcgtcggcgcccacctggagcactggggcgtctccccggaccggctgcgcgagctggactggaacgagtcgacgaaggtgggcggcatctccctgaccgccacccccgcccgtcacttctgcggccgcggcctgcgcaacgtccagcacaccctctgggcctcctgggccgtcgcgggcgacacccaccggatctaccacagcggtgacacgggttacttcggaggcttcaaggacatcggtgccgaacacggcccgttcgacgccacgatgatccagatcggcgcgttcagtgagttctggcccgacattcatatgacccccgaggagggcatgcgcgcccacctcgaccttcagggcggccggcccggcggagtgatgctgccgatccactgggcgacgttcaacctggcgccgcacccgtgggtcgagcccggcgaggggacgatcaccgccgcccgcgcggccggcgcgcgcatcgccctgccccgccccggcgagcccttcgaacccacggccgagaccgtgccgtccgagccctggtggcgcggtgtggccgttaccccgcagggcgggtggcccgccgtcgggccgatcccgggcgatacgccgcgtgacatccccgagggcgccgtggagggcaccggagagccggagaccgtcgccgcgggctga

SEQ ID NO: 6912 - protein, 406 aa, Streptomyces avermitilis MA-4680
MTGFRLPSSGLRAVRPAAFGADPSGERLERIRRSPNFVDGSFVNPEGTRTRPAGGSTLELAKVFLRKEERTRRSPAGTVPVHPTTFADLARPPASGLRLTWMGHSSVLAEIDGHRVLFDPVWGERCSPFDFVGPKRLHPVPLPLAALGPVDVVVISHDHYDHLDLPTIKALAGTDTVFAVPLGVGAHLEHWGVSPDRLRELDWNESTKVGGISLTATPARHFCGRGLRNVQHTLWASWAVAGDTHRIYHSGDTGYFGGFKDIGAEHGPFDATMIQIGAFSEFWPDIHMTPEEGMRAHLDLQGGRPGGVMLPIHWATFNLAPHPWVEPGEGTITAARAAGARIALPRPGEPFEPTAETVPSEPWWRGVAVTPQGGWPAVGPIPGDTPRDIPEGAVEGTGEPETVAAG

SEQ ID NO: 6913 - DNA, 1170 bp, Streptomyces avermitilis MA-4680
  CDS (1)..(1170): transl_table=11
atgacgcagcagacgcagcagacggagcagacggagcagacgaagcagacgaagcagacgaagcagtccgggttcaccacgagcaccgtttcgccgacggaccaggacgccgacgagccgacgtcgacgaccacgaccacgaccacattcacgtccccgtccccgtccccgcccacccccgccgggcccctcgcaccgccgaacgcaccgcccgagccgcgtccgctcggcgagcgccggcgatggcagcgctccttcgccgaccggctgaccgccccgctgcccggactcaaggccttagcccggttcgcccgcgagggcgcgatacggccgggacccgagggactcgccgacatcccgaagctgcccttcgagccggcgccgctgccccgggtggacgcgcgcatggtcgccgtctcctgggcggggcacgcgagttgggtggtccggatcggtggcctcaccgtcctcaccgacccggtctggtcccgccgcatcctcggcacacccgcccggatcacccccgtcggggtggcctggagcgccctgccgcgcatcgacgcggtcgtcatcagccacaaccactacgaccacctggacgcccccaccctgcgcagactcccgcgcgacaccccggtgttcgtgcccgccggactcgcccgctggttccggcgccgccgcttcacgcaggtgaccgagctggactggtgggaggcggccgaactgggcggtgtccgcttggacttcgtgccttcccatcactggtccaaacgcagcctgaccgacacctgccgcaccctgtggggcggttgggtgctcacggcgcccgacgggcagcgcgtgtacttcgctggggacacgggatacgggcactggttcgcgcagatcggccgccgctaccccggtatcgacctggcgctgctgccgatcggcgcgtacgacccgcgctggtggctgagcgacgtgcactgcgatccggaggaggcggtacaggcggcggtcgacctcggcgcgcaccggatggcgccgatgcactgggcgacgttcgtcctgtccgcggagccggtcctggagccgctcacccgggtgcgggcggcctgggagaaggcggggctggcccgcgaggacctgtgggacctgccggtgggggcctcccgggtcctggagtga

SEQ ID NO: 6914 - protein, 389 aa, Streptomyces avermitilis MA-4680
MTQQTQQTEQTEQTKQTKQTKQSGFTTSTVSPTDQDADEPTSTTTTTTTFTSPSPSPPTPAGPLAPPNAPPEPRPLGERRRWQRSFADRLTAPLPGLKALARFAREGAIRPGPEGLADIPKLPFEPAPLPRVDARMVAVSWAGHASWVVRIGGLTVLTDPVWSRRILGTPARITPVGVAWSALPRIDAVVISHNHYDHLDAPTLRRLPRDTPVFVPAGLARWFRRRRFTQVTELDWWEAAELGGVRLDFVPSHHWSKRSLTDTCRTLWGGWVLTAPDGQRVYFAGDTGYGHWFAQIGRRYPGIDLALLPIGAYDPRWWLSDVHCDPEEAVQAAVDLGAHRMAPMHWATFVLSAEPVLEPLTRVRAAWEKAGLAREDLWDLPVGASRVLE

SEQ ID NO: 6915 - DNA, 981 bp, Bacillus cereus ATCC 14579
  CDS (1)..(981): transl_table=11
atgttcatggcaaagcgctatgaaaatatggataatgttagtacaaaaaaatcaattcgctcttttttacgctggcgtaaagaacgaaagcaaaacaaaaaagatttttctttcttagtagaacaatcacccgttaaacaaagtgcatttttgcaaagtaatgttgaaaaaacgactatcacatggattgggcattccacttttcttatccaaacgaatggacttaatatattaacagatccagtatgggctaataaattaaagctagttccaagacttacagaacctggactctctatagaagcactacctaaaattgatattgtccttatttcacatggtcattatgatcatttagatttttcaactcttcgtcagttgaatgatgatgttctatatcttgtacctattggattaaaaaaattatttactcgtaagaaatttaaacatgtagaagagtataaatggtgggaaagtacgataattaacgaagtttcttttcacttcgtaccctctcagcactggacgagaagattcttatttgatatgaatacgtctcactggggtggatggattattgataatgaaacgactatggaaaccatatatttttgtggtgacagtggctatttccaaggtttcaaagaaattggtgaacgctttttaattgatattgctcttatgcccattggcgcttatgaaccagaatggtttatgaaagtatctcatgtttcacctgaagaggccgtgcaagcttatttagatttaaacgctacgcattttataccaatgcattatggagcttttgcactcgccgatgaaacacctcgtgaagcaataactagacttcgaaataattggaatttgcgcatgttaccgtgggaacaactgcatgtactctttttaggtcaaacttttatttatagtaacgcaacaaataataagcaaataaaagaaaaaattgaaactttacatgtgtaa

SEQ ID NO: 6916 - protein, 326 aa, Bacillus cereus ATCC 14579
MFMAKRYENMDNVSTKKSIRSFLRWRKERKQNKKDFSFLVEQSPVKQSAFLQSNVEKTTITWIGHSTFLIQTNGLNILTDPVWANKLKLVPRLTEPGLSIEALPKIDIVLISHGHYDHLDFSTLRQLNDDVLYLVPIGLKKLFTRKKFKHVEEYKWWESTIINEVSFHFVPSQHWTRRFLFDMNTSHWGGWIIDNETTMETIYFCGDSGYFQGFKEIGERFLIDIALMPIGAYEPEWFMKVSHVSPEEAVQAYLDLNATHFIPMHYGAFALADETPREAITRLRNNWNLRMLPWEQLHVLFLGQTFIYSNATNNKQIKEKIETLHV

SEQ ID NO: 6917 - DNA, 963 bp, Bacillus cereus ATCC 14579
  CDS (1)..(963): transl_table=11
atgaataagaaatatacaaatcaaattcatactgatatgagttttaaaccgaaagatattataagtttaatgacggattactttaaaataaaatcaaagctgcgtcctataaaggatttgcctatcgttttatcaaataaagataatgaatcgttagagagtgttacatggtttggccattctgcttctcttttgaaaatagaaggtaaaaaactattattagaccctatgtttggagatgcctcttccccatttcctttgtttaatagtaaacgctatagtggtactttttctttagaacgtgatgaccttcaagaaattgatgcgattatcatttctcataatcactatgatcatttgaattacaaaagtattatgcagttaaaagatcgcgcaaagcacttttatgttccaactggagttgcgcaatatcttattaaatggggtgtttcgcctagtaaaattagtgaacataattggtgggacgaaattacgtttgataatattaagttagtatgtgcgcctgcaaggcatttctcgggacgtggtatgacagatagagatcgttcattatggtgttcatggcttattcttggtcaagagactaaaattttctttagtggtgatagcggttatacccctcactttaaggaaattggtgataaatacggtccattcgatcttacattaatggaatgcgggcaatatgatccgaggtggtctgctattcatatgttgcctgaagaaacggtacaagctcatattgatgttaaaggagaattacttcttccgattcattggggtgcctttacgttagcattacacgaatggagtgacccgatagaacgtgttacgaaagaagctaaccgtttaggagttaaaattacaacgcctcaaattggtgaatctattacgttaaaatctacaaattatccttcatccgcttggtggaaggaaatttaa

SEQ ID NO: 6918 - protein, 320 aa, Bacillus cereus ATCC 14579
MNKKYTNQIHTDMSFKPKDIISLMTDYFKIKSKLRPIKDLPIVLSNKDNESLESVTWFGHSASLLKIEGKKLLLDPMFGDASSPFPLFNSKRYSGTFSLERDDLQEIDAIIISHNHYDHLNYKSIMQLKDRAKHFYVPTGVAQYLIKWGVSPSKISEHNWWDEITFDNIKLVCAPARHFSGRGMTDRDRSLWCSWLILGQETKIFFSGDSGYTPHFKEIGDKYGPFDLTLMECGQYDPRWSAIHMLPEETVQAHIDVKGELLLPIHWGAFTLALHEWSDPIERVTKEANRLGVKITTPQIGESITLKSTNYPSSAWWKEI

SEQ ID NO: 6919 - DNA, 1191 bp, Mus musculus
  CDS (1)..(1191)
atggatgagtatgaggacagccagtctccagcgccaagctatcagtatccaaaagaaacactgagaaagcgccagaattcagtgcagaattcaggaggaagtgtgtcttctaggttctccaggaaaagcttcaagctggattacagactagaggaggacgtaactaaatcaaagaaaggaaaagacgggagatttgttaacccatggccaacatggaaaaacatctccatcccgaatgtgctcagatggctgataatggagaagaatcacagcggcgttccaggttccaaagaggaacttgacaaagagctcccggtgcttaagccatattttgtcagtgaccctgaagacgctggagtgagagaggctggcttacgagtcacgtggctgggacatgcgacgctgatggtggaaatggacgagctcatcttcctcacggaccccatgttcagctcccgtgcctctccctcgcagtacatgggtccgaagcggtttcgccgcccgccgtgtacaataagcgaactccccacgatagatgctgtcctcatcagtcacaaccactacgaccacctagactacggctcggtcctggcgttgaacgagcggttcggcagcgagctgcggtggtttgtgcccttgggccttcttgactggatgcagaaatgtggctgcgagaacgtgattgagctggactggtgggaggagaactgcgtccctggccacgacaaggtcaccttcgtcttcacgccttcccagcactggtgcaaaaggaccctcctggacgacaacaaggttctctggggcagctggtccgtgctagggccttggagtcgattcttctttgctggggatactggctactgccccgcttttgaagagattggaaaaaggtttggtccttttgaccttgcggccattcccatcggagcttatgaaccaaggtggtttatgaaataccagcatgcagacccagaagatgctgtaaggattcacattgaccttcaaacaaagagatctgtggcgattcactgggggacgtttgccttagctaatgagcattacctagagccgccagtgaaactgaatgaagctctagagagatacggactttcttgtgaggatttcttcatactgaagcatggagagtcgagatacttgaataccgatgatagagcttttgaagaaacatga

SEQ ID NO: 6920 - protein, 396 aa, Mus musculus
MDEYEDSQSPAPSYQYPKETLRKRQNSVQNSGGSVSSRFSRKSFKLDYRLEEDVTKSKKGKDGRFVNPWPTWKNISIPNVLRWLIMEKNHSGVPGSKEELDKELPVLKPYFVSDPEDAGVREAGLRVTWLGHATLMVEMDELIFLTDPMFSSRASPSQYMGPKRFRRPPCTISELPTIDAVLISHNHYDHLDYGSVLALNERFGSELRWFVPLGLLDWMQKCGCENVIELDWWEENCVPGHDKVTFVFTPSQHWCKRTLLDDNKVLWGSWSVLGPWSRFFFAGDTGYCPAFEEIGKRFGPFDLAAIPIGAYEPRWFMKYQHADPEDAVRIHIDLQTKRSVAIHWGTFALANEHYLEPPVKLNEALERYGLSCEDFFILKHGESRYLNTDDRAFEET

SEQ ID NO: 6921 - DNA, 1137 bp, Helicobacter hepaticus ATCC 51449
  CDS (1)..(1137): transl_table=11
ttgttgtcaaatgtaaataaaattttgactctattaaagaactgcacactttgcgcatattgtaaagattctataaaaaatcttgcaaaaggctgcaatcccacatttacagaaatgcaaaattttacaaaagctcccaattttgaatgggagaaaactcgtaaaaatacaaatgcaaaaaaaggctattttacaaatcttaatccccaaatgccacatatcaaacgcgcgtcttggtgggaagttgcaagattctatctttttaaacccaaaaatgctaagcccaaacgccctttgccttttattaaaaccaatttcaaaacactctatacaaaaaatcctgccgttgtatggtttggacattcctcactccttataaattatgagcattttaaagttcttattgaccctgtttttagtgattatgcttcgccaaaagcttggattaatcgtgcttttaaatctgatgtctcttggagtgatgatgattttgataacattgatgtgcttgtgattacccacgaccattatgaccatttagattatcctacaataacagctctcaaggataaagtcaaactttttgttgttccgttgggtatcggctctcatttgcgcttttggggtgtagaatctgataaaattacagaactctattggtggcaaagtttaagccttgctcctgctattaaaatcacttctactccttcacaacatagctctggcagaggaatgcaatgggataggacactttggacttcttatgttatggaaattaaagacaaaagaatttttctaagtggcgatggagggtattatacacactttaaagagattggagataagtttggttgtattgatttagcgattttagaaaatggacaatacaatcttgcgtggcaatattcacattcttttacacctcaagttcttcaaactgcccttgatttaaaagctaaaatgattatgcctatccattatggacgatttgttgcaggaagtcacgcgtggaatgaaccgctcaaaaatcttattgcgctctgtgatgcacattccttacctataaatgcaccaaaaataggtgaagtttatgagctaaatactccgcctaaaagggaaatatggtggaacttttag

SEQ ID NO: 6922 - protein, 378 aa, Helicobacter hepaticus ATCC 51449
MLSNVNKILTLLKNCTLCAYCKDSIKNLAKGCNPTFTEMQNFTKAPNFEWEKTRKNTNAKKGYFTNLNPQMPHIKRASWWEVARFYLFKPKNAKPKRPLPFIKTNFKTLYTKNPAVVWFGHSSLLINYEHFKVLIDPVFSDYASPKAWINRAFKSDVSWSDDDFDNIDVLVITHDHYDHLDYPTITALKDKVKLFVVPLGIGSHLRFWGVESDKITELYWWQSLSLAPAIKITSTPSQHSSGRGMQWDRTLWTSYVMEIKDKRIFLSGDGGYYTHFKEIGDKFGCIDLAILENGQYNLAWQYSHSFTPQVLQTALDLKAKMIMPIHYGRFVAGSHAWNEPLKNLIALCDAHSLPINAPKIGEVYELNTPPKREIWWNF

SEQ ID NO: 6923 - DNA, 1275 bp, Chromobacterium violaceum ATCC 12472
  CDS (1)..(1275): transl_table=11
ttgaatcccgccgggcggcacccatcttgtcgatgctcggcggcggaataccgcgcccgggctccggactgcgctcgcagtcgctatcatccaataccggccgccgatgccatcccgggcggcaatgaccaggaaagcatcccgatgaagtctctcggcaggaaagcgtccggcctcaggctggaaagaatgcaggcgtcgtccctctggtccggcagcggtttccgcaacatctacccgatagaacccggcctgcgcgacccatcggcgaccatgccctcgctgcgcgacttcctgtgcggcggcgagcgcagagtgccgggcgcgccgctgccggcggacaatccgctggacgcctggcgcaagccagcccaatccggcctgcgcgccacttggctgggacactccacggtgctgatcgagatcgacggcttgcgcctgctgaccgatccggtatggggttcccgcgcgtctcccacccgcctggccggccccaagcgcttccagccggtgccgatcaaactcaagcagctgccgccgctggatctggtgctggtctcgcatgatcactacgaccacctcgactaccccaccatccgcgagctggccaagaccgacgtccctttcgtcaccgcgctgggcgtgggcgcgcatctggaagccttcggcgtgaggccggagcggatcaccgagctggactggtgggagagctaccagcacccgaaagccgatctcaccatcaccgccacgccgtcccagcacttctccggccggggcctgaaagaccgcaacgccacgctgtggtcgtcgctgtccatccgcagcgcccggcactcggtgttcttcagcggcgataccggcttgtccggacagttcgccgaaatccgcgaacgcatggggcccttcgatctggtgatgctggaagtcggcgcccaccatcccgcctggggcgacatccacctggggcctgacaatgcgctgaaggcgctggagctgctgggcggcggcgccttcctgccggtgcactggggcaccttcaacctggccatgcatgcctgggacgcgccggccgaatccctgctggccagcggcgaaaaagagaacgtccgactgatgatgccgcggctgggtcaagcgatggagccggcccacgccgaacgcgcccatccctggtggcgcgaggtggacagcgtggcggcgcccgccgcgccaagcgagccggaagcggaagcggacgccccgctgccgaaatcgatgccctggcctctggactga

SEQ ID NO: 6924 - protein, 424 aa, Chromobacterium violaceum ATCC 12472
MNPAGRHPSCRCSAAEYRARAPDCARSRYHPIPAADAIPGGNDQESIPMKSLGRKASGLRLERMQASSLWSGSGFRNIYPIEPGLRDPSATMPSLRDFLCGGERRVPGAPLPADNPLDAWRKPAQSGLRATWLGHSTVLIEIDGLRLLTDPVWGSRASPTRLAGPKRFQPVPIKLKQLPPLDLVLVSHDHYDHLDYPTIRELAKTDVPFVTALGVGAHLEAFGVRPERITELDWWESYQHPKADLTITATPSQHFSGRGLKDRNATLWSSLSIRSARHSVFFSGDTGLSGQFAEIRERMGPFDLVMLEVGAHHPAWGDIHLGPDNALKALELLGGGAFLPVHWGTFNLAMHAWDAPAESLLASGEKENVRLMMPRLGQAMEPAHAERAHPWWREVDSVAAPAAPSEPEAEADAPLPKSMPWPLD

SEQ ID NO: 6925 - DNA, 1074 bp, Vibrio vulnificus YJ016
  CDS (1)..(1074): transl_table=11
atgaacaaacgacttatcaaaatcacttttttgactgtgttaggagctattgccatgagttcgatcttcaccgcctgctcgactgctgaagcagagaaatccccttatccaaagacatttcgtaatagtgaccccaatttcaatggcggttctgacctctttgaaatcgtcaaagcgtacttcacgacgaaacgagctgtaccgaaacccacatttgcactgccagtgcatagcatcacgacggaacagttgcttgaggagcagcaagatgtgctctatcgtcttggtcactcaagtgtgctgatgaagttggacggtcaattggtaatgacggatccggtattcagtaaacgcgcctcacctgtacagttttttggccctgcccgctttcacccaactccaattgagctcgatgggctgccaaacatagatgtggttctcattagtcatgaccactatgatcatctcgacaaaaacacggtcaaaaccctggcgagcaaagtgggcgtttttcttgtgccattgaaagtgggcgtgatcttgcaagaatggggcgtggacaagcacaaaatcgttgagtttaattggtgggaaagccacgtagtcaacggaattgagtacgtgttcacgcctacccagcacttttcaggccgaggattaaccgacagtaacagcaccttgtggggaagttgggtcattcgtggccgtgagaaaaacctcttcttcagtggtgactctggctactttgatgggttcaaaaccattggggaaaaatacggcccgttcgacctcaccatgatcgaaactggcgcgtacaacagtttgtggtcgaacattcacatgttccctgaagagagcgttcaagcgcatcttgatttgcaaggccagaaaatgatgccaattcacaacagcacctttgatttggcaatacacgattggcatgaaccgatggaaaaagcgcgacagatcagcgaagaaaaaggagtgacgatgatcagcccagagattggtcagcgccttgtgcttaatgaagaatcaccactcaaaccgtggtggttagaagataacggctaa

SEQ ID NO: 6926 - protein, 357 aa, Vibrio vulnificus YJ016
MNKRLIKITFLTVLGAIAMSSIFTACSTAEAEKSPYPKTFRNSDPNFNGGSDLFEIVKAYFTTKRAVPKPTFALPVHSITTEQLLEEQQDVLYRLGHSSVLMKLDGQLVMTDPVFSKRASPVQFFGPARFHPTPIELDGLPNIDVVLISHDHYDHLDKNTVKTLASKVGVFLVPLKVGVILQEWGVDKHKIVEFNWWESHVVNGIEYVFTPTQHFSGRGLTDSNSTLWGSWVIRGREKNLFFSGDSGYFDGFKTIGEKYGPFDLTMIETGAYNSLWSNIHMFPEESVQAHLDLQGQKMMPIHNSTFDLAIHDWHEPMEKARQISEEKGVTMISPEIGQRLVLNEESPLKPWWLEDNG

SEQ ID NO: 6927 - DNA, 1062 bp, Rhodopseudomonas palustris CGA009
  CDS (1)..(1062): transl_table=11
atgagcctgatcacgcgccgccgcctgctggcgaccgctgccggccttgccgcgacggccgggctctcctccctctggatctcccgcatgagctattaccaaggcccggtcaccgatcacttcgacggcacgcgcttcttcgatcccgatggcgcgccgccgaagaacttctgggaggtgatgcgctggcggttcagccacaagccggcgcaatggcccgaatgggcaccgagcccgttcgccgacaccccgccgccccgcgtcgacggcgccggcgtcaggctggtttatgtcggccatgcgagctggctgatccagaccgccgggctcaacgtcctgatcgacccggtgtggtcggagcgggtctcgccggtctcatttgcagggccgaaacggcacaacgatccgggcatcgcgttcgataagttgccggatatcgacgtggtgctggtgtcgcacggccattacgaccatctcgacctcgccacgttgtcgcggctcgccgccgcccacaagccgcgggtcattacgccgctcggcaatgatttgacgatgaccgcgcacgacgatgcgatccgcgccgaagcctacgattggagcgaccgggtcgcgctgaacgatcgcgttgcggtgacgctggtgccgacccggcactggaccgcgcgcggcctgttcgaccgcaatcgcgcgctgtgggccagcttcgtgctcgaaacgccggccggcaggatctacgtggtgtgcgactccggctatggcgacggccggcatttccgccgcgtccgcgatgcgcacgccccgctgaagctggcgatcctgccgatcggcgcctacgagccgcgctggttcatgcaggatcagcacatgaacccggccgatgcggtgaaggcgctggccgattgcggcgccgagcgggcgctcgccaatcaccacggcaccttccagctcaccgacgaggcgatcgatgcgcccgagcaggcgctgtatgcggcgctcgatgccgagggcgtgccgcgtgagcggtttccggtgctgaagcccgggcaggtgttcgagctgtga

SEQ ID NO: 6928 - protein, 353 aa, Rhodopseudomonas palustris CGA009
MSLITRRRLLATAAGLAATAGLSSLWISRMSYYQGPVTDHFDGTRFFDPDGAPPKNFWEVMRWRFSHKPAQWPEWAPSPFADTPPPRVDGAGVRLVYVGHASWLIQTAGLNVLIDPVWSERVSPVSFAGPKRHNDPGIAFDKLPDIDVVLVSHGHYDHLDLATLSRLAAAHKPRVITPLGNDLTMTAHDDAIRAEAYDWSDRVALNDRVAVTLVPTRHWTARGLFDRNRALWASFVLETPAGRIYVVCDSGYGDGRHFRRVRDAHAPLKLAILPIGAYEPRWFMQDQHMNPADAVKALADCGAERALANHHGTFQLTDEAIDAPEQALYAALDAEGVPRERFPVLKPGQVFEL

SEQ ID NO: 6929 - DNA, 1068 bp, Geobacter sulfurreducens PCA
  CDS (1)..(1068): transl_table=11
atggcatccacattgttcaataaaaccagttccgccaggacccggtcatctctctcgctcgcgagtgacctgaaacgtccggtcgaggtgacaacaggcggaccgcttgagctggcccgcgtcatgtgggatttctttttcaacaaacctgcagacacgcgcccttccgggaaaatcccggtacagacagtgatcggagcgcagttgatgagtgccccgaacaacacggtgtaccgtcttggacactcaaccgtcctgatgaagcttaatgacgcattctggataaccgacccaatgttttcggaccgggcatcacccgtacggtttgccgggccggaacggttccacccgccccccatcagtatcgacgagctcccgccgatcagggcggtaatcatctcccacgaccattacgaccatctggaccacgattccatcatgaagctggcgggaaaaacggagtatttcctgacgccgctcggggtgggggacatccttgccgactggggtgtgccggcggcaaaggtgcggcaactggactggtggcagggaatcgacgtcggcggtgtccgctttgttgccacccctgcgcaacacttctccggacgcggtttcttcggcaaaaatcttacccagtgggcttcatgggtaatccttgcccctggccggcgcctgttcttcagtggtgacaccggctatttcgacggcttcaagcagatcggcgatcaatatggcccctttgacctgaccttgttggaagcaggtgcctacaatgcacgctggccgaacgtccacatgcacccggaagagagcatccaggcgcatctcgacctgaaaggcaagagcctgctcccgatccacaacggcacctttgatctctccatgcacccctggcgggagccttttgacagaatagccgccctgggcattgcccggggcattccggtcttaactccgctgatgggcgaaccggtgagcatggacgaggccacgggcggcctgcgctggttgcagctgaagccagagaggcaaaaacggctaaaccccgcccgagggagcagggtttag

SEQ ID NO: 6930 - protein, 355 aa, Geobacter sulfurreducens PCA
MASTLFNKTSSARTRSSLSLASDLKRPVEVTTGGPLELARVMWDFFFNKPADTRPSGKIPVQTVIGAQLMSAPNNTVYRLGHSTVLMKLNDAFWITDPMFSDRASPVRFAGPERFHPPPISIDELPPIRAVIISHDHYDHLDHDSIMKLAGKTEYFLTPLGVGDILADWGVPAAKVRQLDWWQGIDVGGVRFVATPAQHFSGRGFFGKNLTQWASWVILAPGRRLFFSGDTGYFDGFKQIGDQYGPFDLTLLEAGAYNARWPNVHMHPEESIQAHLDLKGKSLLPIHNGTFDLSMHPWREPFDRIAALGIARGIPVLTPLMGEPVSMDEATGGLRWLQLKPERQKRLNPARGSRV

SEQ ID NO: 6931 - DNA, 1191 bp, Rattus norvegicus
  CDS (1)..(1191)
atggatgaaaatgagaacagccagtctccagcgccaagccatcagtatccaaaagaaacactgaggaagcgtcagaattcagtgcagaattcaggaggaagcgagtcttccaggctctccaggaaaagcttcaagctggactacagactggaggaggacgtaaccaaatcaaagaaaggaaaagacgggagatttgtgaacccatggccaacgtggaagaacgtctctatcccaaacgtgctcagatggctgataatggagaaggatcacagcagtgtcccgggttccaaagaggagcttgacaaagaactcccagtgcttaagccttattttatcagtgacccggaagaagctggagtgagagaggctggcctacgagtcacgtggctgggacacgcgacgctgatggtggaaatggacgagctcatcctcctcacggatcccatgttcagctctcgagcctctccctcgcagtacatgggtccgaagcggttccgccgtcccccgtgtaccataagcgaactgcccccaatagatgctgtcctcattagtcacaaccactacgaccacctggactacggctctgtcctggctctgaatgaacggtttggcagtgagctgaggtggttcgtgccgctgggccttctcgactggatgcagaagtgtggctgtgagaacgtgattgagctcgactggtgggaggagaattgcgtccctggccatgataaggtcaccttcgttttcacgccctcccaacattggtgtaaaaggaccctcctggatgacaacaaggttctgtggggcagctggtctgtgctagggccttggaatcggttctttttcgctggggatactggttactgccctgcttttgaagagattggaaaaaggtttggtccttttgacctcgcggctattcccattggagcttatgagccaaggtggtttatgaaataccaacatgctgacccagaggatgctgtaaggattcacattgacgttcaagccaagagatccgtggcgattcactgggggacttttgccttagctaatgagcattacttagagccgccggtgaaactgaatgaagctctagagagatatggactcaagagtgaagacttcttcatcctgaagcacggagagtcacgatacttgaataccgatgacaaagcctttgaggaaacatga

SEQ ID NO: 6932 - protein, 396 aa, Rattus norvegicus
MDENENSQSPAPSHQYPKETLRKRQNSVQNSGGSESSRLSRKSFKLDYRLEEDVTKSKKGKDGRFVNPWPTWKNVSIPNVLRWLIMEKDHSSVPGSKEELDKELPVLKPYFISDPEEAGVREAGLRVTWLGHATLMVEMDELILLTDPMFSSRASPSQYMGPKRFRRPPCTISELPPIDAVLISHNHYDHLDYGSVLALNERFGSELRWFVPLGLLDWMQKCGCENVIELDWWEENCVPGHDKVTFVFTPSQHWCKRTLLDDNKVLWGSWSVLGPWNRFFFAGDTGYCPAFEEIGKRFGPFDLAAIPIGAYEPRWFMKYQHADPEDAVRIHIDVQAKRSVAIHWGTFALANEHYLEPPVKLNEALERYGLKSEDFFILKHGESRYLNTDDKAFEET

SEQ ID NO: 6933 - DNA, 1110 bp, Mycobacterium avium subsp. paratuberculosis K-10
  CDS (1)..(1110): transl_table=11
atgcgggggacgcttcggctggtcgccgggacggcgtcgctggccgccggcggttggctggtgcgcgccctgcacggcgccccggacgccctgggcgccgaccccgcgtcgatcgcgaccgtgacgtccggctcgccgcacttccgcgacggcgccttcgtcaacctcgagcccgcctccgaaatcaagatggaccgcgagcagctgcggctgatcgcctgggagctgatcgcgaaccggggcggcagccgtccgccggcggcgatcccgctggcctcaccgggggtcgtcgacgccgaccccagccggctggcggtcagctggttcggccactccacggcgctgctggaaatcgacgggtaccgggtgctcaccgatccggtgtggagcgagcggtgttcgccgtccgacatcgtggggccgcaacggctgcatccgccgccgatccaactcgaagggctgcccgccgtcgatgcggtggtgatcagccacgaccactacgaccacctcgacatcgacaccgtccgggcgctggcccgcacccagcgcgccccgtttttcgtgccgctgggtgtcggcgcccacctgcgccggtgggggatccccgagcagcgcatcgtcgagctcgactggcaccagagcggcaaggtcgacgagctgaccgtgacctgcgtgccggcgcggcacttctcgggacgcttcctggaccgcaataccacgctgtgggcgtcgtgggcgttggccggcccgacccatcgcgcctacttcggcggcgacaccggctacaccaagaccttcgcccagaccggcgccgagcacgggccgttcgacctgaccctgctgcccatcggggcctacaacacggcctggccggacgtccacatgaaccccgaggaagcggtgcgggcacaccgggacgtcaccgacgacggactgctggtgccgatccactggggcaccttccgattggcgccgcacccgtgggccgaacccgttgagcgcctgctcgccgccgccgagccggcgaaggtgaaggtggcggtgccggtccccggtcagcgcatcgatcccgcggccccgcagaaacccgacccgtggtggcggctctga

SEQ ID NO: 6934 - protein, 369 aa, Mycobacterium avium subsp. paratuberculosis K-10
MRGTLRLVAGTASLAAGGWLVRALHGAPDALGADPASIATVTSGSPHFRDGAFVNLEPASEIKMDREQLRLIAWELIANRGGSRPPAAIPLASPGVVDADPSRLAVSWFGHSTALLEIDGYRVLTDPVWSERCSPSDIVGPQRLHPPPIQLEGLPAVDAVVISHDHYDHLDIDTVRALARTQRAPFFVPLGVGAHLRRWGIPEQRIVELDWHQSGKVDELTVTCVPARHFSGRFLDRNTTLWASWALAGPTHRAYFGGDTGYTKTFAQTGAEHGPFDLTLLPIGAYNTAWPDVHMNPEEAVRAHRDVTDDGLLVPIHWGTFRLAPHPWAEPVERLLAAAEPAKVKVAVPVPGQRIDPAAPQKPDPWWRL

SEQ ID NO: 6935 - DNA, 1074 bp, Bdellovibrio bacteriovorus HD100
  CDS (1)..(1074): transl_table=11
atggtgggttgttcttcatttggttctttgccttccgacgagcaagtggcggcttaccaaaactctctgaactatgacaaagaaagaaaggtgtttgttaatcgtcgtccacgtctggtggaagaaatgcgcaagcgcacaatgaattttgccaccaccaaagaattcctgttcggtggggatgcggaaagaattccgagtgaggctttgccagaggtcagaactgattttgccagattcagtcaggccggtgatgacctgaaggtcgtctggtttggtcattccagcgtgctgatgaagcttgatggcaagaatgttttgatcgatccggtgctttcaacatccacgggacccttcggttttatgatgaagagattccaaaagccggtgattgagctttctgaattgcctgaaattgatgtgatcatcgtttcccatgaccattgggatcacttggatatggattcgatcaaattctttaagaacaagtccactcggtttgtggtgcccctgggggtggcggcgcatttgaccggatggggtattgaagccagtcgcattcaggaattggactggtggcagggggtggaaattgccggcattaagttcacggcaactcctgcccagcatttctccgggcggggctttacgaatcagaacaaatccctgtgggcttcgtgggtgatcaaaagttccaagcacaatgtctatttctgtgcggactctggctatgacacgcactttaaggacataggtgaaaagatggggccctttgatttggcctttattgaaaacggccagtacaacgaaaaatggcgtgaggtgcacctgttgccggatgaatccatccaggcctttaaggatctgaatgcgaaaaggtattttccgattcattggggcatgttctcgctggcgctgcattcctggtctgaaccgattgagaagatttctgcagccacggcccgtgagggaatttcgttggtagcgccgcagatcggtgaggtggtgaccatcaatgatcaatatgtgactcagacctggtggaagaagaacaacagcgccaaggcggattaa

SEQ ID NO: 6936 - protein, 357 aa, Bdellovibrio bacteriovorus HD100
MVGCSSFGSLPSDEQVAAYQNSLNYDKERKVFVNRRPRLVEEMRKRTMNFATTKEFLFGGDAERIPSEALPEVRTDFARFSQAGDDLKVVWFGHSSVLMKLDGKNVLIDPVLSTSTGPFGFMMKRFQKPVIELSELPEIDVIIVSHDHWDHLDMDSIKFFKNKSTRFVVPLGVAAHLTGWGIEASRIQELDWWQGVEIAGIKFTATPAQHFSGRGFTNQNKSLWASWVIKSSKHNVYFCADSGYDTHFKDIGEKMGPFDLAFIENGQYNEKWREVHLLPDESIQAFKDLNAKRYFPIHWGMFSLALHSWSEPIEKISAATAREGISLVAPQIGEVVTINDQYVTQTWWKKNNSAKAD

SEQ ID NO: 6937 - DNA, 1077 bp, Bdellovibrio bacteriovorus HD100
  CDS (1)..(1077): transl_table=11
ttgcctacaaagccgctcggtgagactctgcggggcatgaaactgaccatgatcactgtggccgggttgtttgtgtttttggggtgccaaagtttccgttatcacgacccccagaagccgcatcgcggagcaacccagttttacaataactatgacaattcccccaaagccagcttctggaagtggcagtgggaacgtctgacggggccccgccacgaagagccgccgttcaatccgcctgtgttaaaaaccgacacggattttttgcgtcagaataagaacgaaaccactttgacctggattgggcacagctcctttctgctgcagcttcagggaaaaaacattgtcaccgatccggtgttttccgagcgtgtgtccccagtgagttttatggggccgaagcgtttggtcgcgttgccgtttgaactaaaagaactgcctccggtggatgtggtgctgatatctcactgccactatgatcatctggatttaaagaccctgcgtgatctgaataaacagaatcaaggcaagaccttgttcctggttcctttgggcaatgccgatcttttgaaattcgaagggattgaaaacgtcaaagaactggattggtgggatcagatcactctggatgatttgacgatcaccttcactcctgcccagcactggactcagcgcactctctgggatcgcaaccagagtttatggggcggctggcatgtgcagtcggaaaaattcaaattcttctatgccggggacaccgggtattcgaaagatttttcagatgtgcacacgaagtttggcaatgttgatctggcgctgatcccgattggcgcctatgagccgcgctggttcatgggtcagcagcatgtggatccggatggagcagttaaaattcacaaggaccttcattcccgcctgagcattggggtacactggggcactttccgcctcagtgacgagcccttggctgaaccgcctctggaattggcagcggcaagggaacgggccggaatcagcgaaagtggattccgcgtgatgatgcacggtgaagttttgaaattggacaatagaaaatag

SEQ ID NO: 6938 - protein, 358 aa, Bdellovibrio bacteriovorus HD100
MPTKPLGETLRGMKLTMITVAGLFVFLGCQSFRYHDPQKPHRGATQFYNNYDNSPKASFWKWQWERLTGPRHEEPPFNPPVLKTDTDFLRQNKNETTLTWIGHSSFLLQLQGKNIVTDPVFSERVSPVSFMGPKRLVALPFELKELPPVDVVLISHCHYDHLDLKTLRDLNKQNQGKTLFLVPLGNADLLKFEGIENVKELDWWDQITLDDLTITFTPAQHWTQRTLWDRNQSLWGGWHVQSEKFKFFYAGDTGYSKDFSDVHTKFGNVDLALIPIGAYEPRWFMGQQHVDPDGAVKIHKDLHSRLSIGVHWGTFRLSDEPLAEPPLELAAARERAGISESGFRVMMHGEVLKLDNRK

SEQ ID NO: 6939 - DNA, 975 bp, Bacillus cereus ATCC 10987
  CDS (1)..(975): transl_table=11
atggcaaagcgctatgaaaatatggataatgtgagtacaaaaaaatcaattcgctcttttatacgctggcgtaaagaacgaaagcaaaacaaaaaagatttttctttcttagtagaacaatcacccgttaaacaaagtgcatttttgcaaagtaatgttgaaaaaacgactgtcacatggattgggcattccacttttcttatccaaacgaatggacttaatatattaacggatccagtatgggccaataaattgaagctagtcccaagacttactaaacctggtctttctatacaagaactacctaaaattgatattgtcctcatttcacatggtcattatgatcatttagatttttcaacacttcgccaacttaatgatgacgtattatacttagtacccattgggctaaaaaaattatttactcgtaaaaaattcaacaatgtagaagagtataaatggtgggaaagtacgactattgatgatgtttcctttcacttcgtacctgctcagcactggacgagaagatcattatttgatatgaacacatctcactggggtggatggattattaaaaatgacaatgtggaggaaaccatttatttttgtggagacagtggctatttccaaggtttcaaagaaattggcaaacgcttttcaattgatattgcccttatgccaattggagcttatgaaccagaatggtttatgaaaatatctcacgtttcacctgaagaagcagtgcaagcttatttagatttaaatgctacacactttataccaatgcattacggagcttttgcactcgccgatgaaacacctcgtgaggcaataacaagacttcgaaataattggaatttacgtatgttaccgtgggaacaactgcatgtactctttttaggtcaaactttcacttataatggcgaaacacatgctaagaaagtgaatgaaaaaattaacacattacatgtataa

SEQ ID NO: 6940 - protein, 324 aa, Bacillus cereus ATCC 10987
MAKRYENMDNVSTKKSIRSFIRWRKERKQNKKDFSFLVEQSPVKQSAFLQSNVEKTTVTWIGHSTFLIQTNGLNILTDPVWANKLKLVPRLTKPGLSIQELPKIDIVLISHGHYDHLDFSTLRQLNDDVLYLVPIGLKKLFTRKKFNNVEEYKWWESTTIDDVSFHFVPAQHWTRRSLFDMNTSHWGGWIIKNDNVEETIYFCGDSGYFQGFKEIGKRFSIDIALMPIGAYEPEWFMKISHVSPEEAVQAYLDLNATHFIPMHYGAFALADETPREAITRLRNNWNLRMLPWEQLHVLFLGQTFTYNGETHAKKVNEKINTLHV

SEQ ID NO: 6941 - DNA, 963 bp, Bacillus cereus ATCC 10987
  CDS (1)..(963): transl_table=11
  misc_feature (321)..(321): k is g or t
  misc_feature (327)..(327): m is a or c
atgaaaaagaaatatgtaaatcaaattcatactgatgtaagttttaaaccgaaagatattataggtttaatgactgattactttaaaatgaaaacaaagttgcgtcctataaagaatttacctattgttttatcagataaaaacaataagtctttagagagtattacatggtttggccattctgcttctcttttaaaaatagaaggtaaaacattgttattagacccgatgtttggagatgcctcttccccgtttccagtgtttaatagtaaacgttatagtggttctttttctttagaacgtgaagaactgcaagaaatkgatgcmattattatttctcataatcactatgatcatttaaattataaaagtattatgcaattaaaagatcgtgtaaagcatttctatgttccaactggagttacgcaatatttaattaaatggggtgtttcacctagtaaaattagtgagcataattggtgggatgaaattatgcttgatactattaagttagtatgtgcccctgcaaggcatttctctggacgaggtatgacagatagagattgttcgttatggtgttcatgggctatccttggtcaagaaactaaagttttctttagtggcgatagcggttatgcgcctcactttaaggagattggtaataaatacggtccattcgatcttacgttaatggaatgcgggcaatatgatccaaggtggtctgctattcatatgttgcctgaagaaacagtacaagctcatattgatgtaaaaggagaattacttcttccgattcattggggtgcttttacattagcattacacgaatggagtgacccgatagaacgtgttacgaaagaagctaaccgtttaggagttaaaattacaacacctcaaattggcgaatctattacgttaaaatctacagactatcctaggtatgcttggtggcaaaaagtctaa

SEQ ID NO: 6942 - protein, 320 aa, Bacillus cereus ATCC 10987
  misc_feature (107)..(107): The Xaa at location 107 stands for Ile, or Met.
MKKKYVNQIHTDVSFKPKDIIGLMTDYFKMKTKLRPIKNLPIVLSDKNNKSLESITWFGHSASLLKIEGKTLLLDPMFGDASSPFPVFNSKRYSGSFSLEREELQEXDAIIISHNHYDHLNYKSIMQLKDRVKHFYVPTGVTQYLIKWGVSPSKISEHNWWDEIMLDTIKLVCAPARHFSGRGMTDRDCSLWCSWAILGQETKVFFSGDSGYAPHFKEIGNKYGPFDLTLMECGQYDPRWSAIHMLPEETVQAHIDVKGELLLPIHWGAFTLALHEWSDPIERVTKEANRLGVKITTPQIGESITLKSTDYPRYAWWQKV

SEQ ID NO: 6943 - DNA, 1362 bp, Eremothecium gossypii
  CDS (1)..(1362)
atgcgcaagctattccgacatatccagaacgtgcatttttgtgggaatccgtttggacgcttttgtagcagtattaggggtgcttctactccgagacaagagaaatgtcgtaacaggaggatgggaatcccagttgcaaaggccttactgggactagcaaccccgtacacggcctatgctctatacatatcgctgcaatcgaacagggaaattactgcgagggagaataaactccaagataaggaatcgatggatttcgcagacacactaatcaaatattctcagctagaaattctaggccgcttcgaaaacccgtttaccgagtaccgaattcaaacagtatatgagttcttttttaatcgcttggtagaggtttttgagcgcaaccgcggaggtattccggtgcagcagagcgcgatggatgatctgatgccggtccacaagcctagctggaccaatggagagaatatggaatgcgaagtcaaattctcatacgaagtgctgggtcccgaccaggccccagcacagcggcaagctcaacaacttccacctttgcacgttacgtggctggggcaatcctgtagctacattgtatatcgcagtgttaaaatactcactgacccgctgatgtctgattacttgttgcataacaaattaggacccaaacgtatcaccaaaatgcctgcacagccagaagaggttcctgtacctgatgttattctggtatcgcataaccatcccgatcatctggatgaagtgagcatgaaaaagtggggatccgggagttcagccgccctgtggatagtaccgaagggtttaggcgaatatgttgaaagacatggtgtggaacgatatgttgaattgtcctggtgggagacttgccgtctaaaatttcagggcacaggggagcttccctcgagtttggatgttgtgtgcacccccgcaatgcattggtctggccgtaccttgtttgatgcaaatagatctctctgggcctcttttctcatacgtgacaaggatatgcctgtgcttttccacgcaggtgatacagggtatgtcgctgatcttttcttgcggatcaaagagcgttttggcgccggtgtgaagttagcactcttgccctgtggccagtattgtccggaatggcaccaaaagccacgccacatcagccctagcgaggttttaatgataatgaaagatatggaagcaaaaagtgtcctaggtgtccattggggaacatttgtactcagcggggaatactttcgagaaccgaaggagaagttggagatattggcagagtttgagggtgtgagagacaattgttactgcccggagctaggtaaaacaataaccatatactga

SEQ ID NO: 6944 - protein, 453 aa, Eremothecium gossypii
MRKLFRHIQNVHFCGNPFGRFCSSIRGASTPRQEKCRNRRMGIPVAKALLGLATPYTAYALYISLQSNREITARENKLQDKESMDFADTLIKYSQLEILGRFENPFTEYRIQTVYEFFFNRLVEVFERNRGGIPVQQSAMDDLMPVHKPSWTNGENMECEVKFSYEVLGPDQAPAQRQAQQLPPLHVTWLGQSCSYIVYRSVKILTDPLMSDYLLHNKLGPKRITKMPAQPEEVPVPDVILVSHNHPDHLDEVSMKKWGSGSSAALWIVPKGLGEYVERHGVERYVELSWWETCRLKFQGTGELPSSLDVVCTPAMHWSGRTLFDANRSLWASFLIRDKDMPVLFHAGDTGYVADLFLRIKERFGAGVKLALLPCGQYCPEWHQKPRHISPSEVLMIMKDMEAKSVLGVHWGTFVLSGEYFREPKEKLEILAEFEGVRDNCYCPELGKTITIY

SEQ ID NO: 6945 - DNA, 1341 bp, Candida glabrata CBS138
  CDS (1)..(1341)
atgttttgttctgtgggtcgtatcccattccagcgatgccgattgcatgcccggtcgttaagtatcagcccgttgactaaaaaggagaaaagacgcataggctatggttcattggcggttttgagctttctagtcccttacactgcctatgctgtgtttgtgactgtgtctgcctattcggaaattgacaccaggctggacttaagcgaagtggttgagaagaaagatgggttaaactaccaaggcactcttatcaagtattcgcccttgcaagtcctaggcaggtatgagaatccatttgctgaatatagaattcaaactatatatgaatttttcatcaacagagttgtcgaattgtttcaaagaaatcgtggaggtataccagcagaaagagctcacatgaatcaattgatgccagtgcataaacctacatggtcggaggacaagatcaaaatagaagatgaacaattaataaaatatcaattactcacagaacatgatgatctaaaaactatgaatgtaaatgtagactcgaaggacgataatattccagtttacagcacatggttaggccagtcctgtaattttgtgagctataacggattgaaggtattaacagaccctttattctcagattatttaatacataaaaaacttgggcctaaacggatcactgatatgcctgcaaatattgaagacgtaccaaaaccagatatcataatggtatcacacaatcaccctgatcatttagaccaagaaagcattgagcattggaaaaactcagagactttgtggattgtacccaaaggtttgaagtcctatatggataagaataaaattaaaaactacattgagctgtcttggtgggaaacgtgcgagttagagaaagacaacgagatttaccacatttcatgcacgccagcaatgcattggtctggtagatcagtcctggacaccaatcaatcattgtggtgctcttttttgctaagtcacaacaaaaaaccgattttattccatgctggtgatactggctatgtcaaagatttatatgtcagaataaaagatagatttggtgccggatgtaaattagcactgttaccttgtggtcaatactgtcctgaatggcatcaaaagcctcgacatattaatccaagggaagtcatcaaaatcatgaaagatatggaagctaaccaggttcttggtgttcactggggtacttttgttcttagtggtgaatacttcctggaaccaaaagagaggctggagatgcttgcagaatttgatggaatacgggacaaatgttattgcccagaattgggtaaaacaatcaaaatcgaatag

SEQ ID NO: 6946 - protein, 446 aa, Candida glabrata CBS138
MFCSVGRIPFQRCRLHARSLSISPLTKKEKRRIGYGSLAVLSFLVPYTAYAVFVTVSAYSEIDTRLDLSEVVEKKDGLNYQGTLIKYSPLQVLGRYENPFAEYRIQTIYEFFINRVVELFQRNRGGIPAERAHMNQLMPVHKPTWSEDKIKIEDEQLIKYQLLTEHDDLKTMNVNVDSKDDNIPVYSTWLGQSCNFVSYNGLKVLTDPLFSDYLIHKKLGPKRITDMPANIEDVPKPDIIMVSHNHPDHLDQESIEHWKNSETLWIVPKGLKSYMDKNKIKNYIELSWWETCELEKDNEIYHISCTPAMHWSGRSVLDTNQSLWCSFLLSHNKKPILFHAGDTGYVKDLYVRIKDRFGAGCKLALLPCGQYCPEWHQKPRHINPREVIKIMKDMEANQVLGVHWGTFVLSGEYFLEPKERLEMLAEFDGIRDKCYCPELGKTIKIE

SEQ ID NO: 6947 - DNA, 1335 bp, Kluyveromyces lactis NRRL Y-1140
  CDS (1)..(1335)
atgtacaggatacgtaccggcaatctagtgcaaaggttgaatctggcaagaaattatactcaaaaaagtacgaaacaaactagaaggaccggactgaaaattctcttgtacttttcgataccgtacaccggctatgcattatatgtattcggcagcacaaactatgaaattacgagaagagagcggcagcttgccgacaaagatgatctagaattcaagagcactcttgtgaaatactctccgttccaggttttgggacggttcgaaaaccctttcaatgaatacagaattcaaactgtatttgagttctttttcaatcgagtcgttgaagtgttccaaagaaatagaggtggtctaccgagatcgaaagagcaaatggacgagttgatgcctattcataaaccgacatgggtaaccaagggagttttggataactctcataatgaaattgaagtcgagattaaaccattttcttcagacgaaaaagaagtgaacaccgaacctgtcaaacggttatattgcacatggctaggtcaatcatgcagcgtgattatattggataaattgaagatacttacggatccaatgttttcgaaacatttaatacatcccacctttggcccacaacgaatcactgatatgccagcgaaaatcgaagatgtaccgacgccagacttgattttggtttctcacaaccatccagatcatttagacgaaaaaagtcttaaattttggggtgatgatcatccacagaaaccaatgtggattgttccaaaaggattagcttcttatatgataatgaacaatgtttccaatttcacggagttgtcatggtgggaaacttgccatgtgaagataaaaggtgcgcaagaagataccatttaccaaatatcctccacgccggcaatgcattggtcaggaagatctgtgttagatgcgaataggtcattatggtgttcgttcatagtacataagggtaacaaaccggtgttattccatgcgggagacactggttttgtgcatgatttatacaaaagaatcgttaaaaaatatgggagcggcgtacggctagctttgctcccctgtggtcaatattgccccgaatggcatcaaaggcctcgacatataaacccagcagaagtcatcaagatcatgaatgatttggatgcgcaaactgctcttggtatccactggggaacatttcttctgagtggggagtactttagagaacctaaagagaaactagagttcttatctgagtttaacgaattaaaagatagatgcttttgtcccgagttgggtgagactttagatttctcaaataatgtagaataa

SEQ ID NO: 6948 - protein, 444 aa, Kluyveromyces lactis NRRL Y-1140
MYRIRTGNLVQRLNLARNYTQKSTKQTRRTGLKILLYFSIPYTGYALYVFGSTNYEITRRERQLADKDDLEFKSTLVKYSPFQVLGRFENPFNEYRIQTVFEFFFNRVVEVFQRNRGGLPRSKEQMDELMPIHKPTWVTKGVLDNSHNEIEVEIKPFSSDEKEVNTEPVKRLYCTWLGQSCSVIILDKLKILTDPMFSKHLIHPTFGPQRITDMPAKIEDVPTPDLILVSHNHPDHLDEKSLKFWGDDHPQKPMWIVPKGLASYMIMNNVSNFTELSWWETCHVKIKGAQEDTIYQISSTPAMHWSGRSVLDANRSLWCSFIVHKGNKPVLFHAGDTGFVHDLYKRIVKKYGSGVRLALLPCGQYCPEWHQRPRHINPAEVIKIMNDLDAQTALGIHWGTFLLSGEYFREPKEKLEFLSEFNELKDRCFCPELGETLDFSNNVE

SEQ ID NO: 6949 - DNA, 1365 bp, Debaryomyces hansenii CBS767
  CDS (1)..(1365)
atggtaactagtctattttcgttcaaagcgaaggttggtataggtctatttttgtcatatacctcattcgaggtttacatgcatctaagaacgaaacagattatatcgcaaaggaaacaggaatatgaaaagttcagtaattccttggatacaaattctatagataaagatgttgattttagcaaattcaagtcggctacggttgctggtatgtttgttaatccgtttgatgaatataggcctcagactgcatttgaattcctacttgttcgaatcatggaagtgttcgaaagtctttatggaaatctgattgaattgcataggaaagtaaccgaagaaggtgctagtgatgtcgaaggagtgttgcagtcatataaacctgatctagaattaatcagacaaaactctatattatttcaagaatgcataagtagaaataatttcaagaacttaacaagtacatataatggatggcttaatgtttttcccacaaaatcactaccacctttagggcaccaaatgatattcacttggttaggacaatcctgctcattagtgcaaatttctggtataaacttcttaacagacccaattttaagtaagcatctaatagctgagtctttcggcccgaagagattaatggaatcttcaatgtcttttgaagatatcaaatacgctaccaataacaacattaactttacattggtatcgcatgatcatccagaccatttagaaatgaatgttgttaggaaaattggcaattcaactacttggatcttgccattggggttaaaaaagaagtttgccagaaatggcatatataacgttattgaaatggattggtgggattccgtaccattaaatcagtacataagtaatgaagctaatttgacagataattatgaggttgtatgtgtcccagctatgcattggtctgggaggtacatttttgactcgaataccacgttatggtgttcatatataatcaaacgtaacggagaagcattattatatcatgcgggtgatacgggttatctgaaggaactatttaaaattatcggtgcaaagtactctccaataaatttgtctttattgcctataggacaatactgtccgtcatggcatcagaaacctagacatatttcgccacaagagtcactacaaatctgtgaatgcgtctcttcaaaattcatgatgggaatccattgggggactttcaagcttagtagtgaacctatcctagagccaaagcatttattagaacaatatgctgccattatggggaaatctgacagctatagagcaccacacttaggactaacttacgtttacgatttagaaaaaaaaagcattgaagaacgctga

SEQ ID NO: 6950 - protein, 454 aa, Debaryomyces hansenii CBS767
MVTSLFSFKAKVGIGLFLSYTSFEVYMHLRTKQIISQRKQEYEKFSNSLDTNSIDKDVDFSKFKSATVAGMFVNPFDEYRPQTAFEFLLVRIMEVFESLYGNLIELHRKVTEEGASDVEGVLQSYKPDLELIRQNSILFQECISRNNFKNLTSTYNGWLNVFPTKSLPPLGHQMIFTWLGQSCSLVQISGINFLTDPILSKHLIAESFGPKRLMESSMSFEDIKYATNNNINFTLVSHDHPDHLEMNVVRKIGNSTTWILPLGLKKKFARNGIYNVIEMDWWDSVPLNQYISNEANLTDNYEVVCVPAMHWSGRYIFDSNTTLWCSYIIKRNGEALLYHAGDTGYLKELFKIIGAKYSPINLSLLPIGQYCPSWHQKPRHISPQESLQICECVSSKFMMGIHWGTFKLSSEPILEPKHLLEQYAAIMGKSDSYRAPHLGLTYVYDLEKKSIEER

SEQ ID NO: 6951 - DNA, 1320 bp, Yarrowia lipolytica CLIB99
  CDS (1)..(1320)
atgaaactcggaatcaaggcgaaaacgggtctcggccttgttgtcgcgtacacagcgtactcaacgtatgtgcatttacgcacccattacgaaatcaacgatcggctggacaagaaactgaaatccaccgactttggactcagctccaacgtttctcttcgagacggtatccctccttctgtgcagtttcgacccatggttgtcggaggcaagtttgtcaatcccttcagccaataccgacaccagactcttttcgagtttgtgtactgcaacattgtcaacctattccacttgactccccgaggaggtctccccaaggaccccaaagagctcaagaagctgctccccagtgtgacccccgacttccagctgctatccgagcccgtcaagcaggtctctgctctgatcccctggaagcccaagtctttcattcccaaaccgcaggatcgaatcaccctcacctggatcggacagtcctgtgcgtttgtgcagcttggaggactcaacattctcaccgatcctttctttggtgaccatctggtcacatcgtggatgggcccccagcgactttcgaaggccccctgtcagtttgaagacctgcccaaggtcgacattgttttggtgtcacatgaccatcccgaccatctggaggtggacaccgtgaagaagattggaaactcagctctgtgggtcgtgcctctgggtgtgaagaaatttctggctaaatacggcgtctacaacgttgccgagctcaactggtgggaaaccatgggtctcgaaaccccgaaatcgcaggaactgggcgagaaatggaccgtggcatgcactccagccatgcactggagtggccgaaagatgtacgacgccaactcgactctctggggctcttttatggtcatgaaggacggaaaaccccactttttccacgcaggagatactggatactcaccagagctgttccgaggaatcaaggaggaatacggacccgggtgcaagcttgccatgctgccctgtggcgcttacaagcccagatggcatctcaagagtcaacacattgacccccaggaggccgttaacgtaatgaaggatctggaggccaagaatatggtcggtgtgcactggggaacgttcattctcagtgacgagaagttcacagaaccccgagactcgctgcacaagattgctgaggacgctggggtcggcaactcggttctggctcccaagtttggacagacactggtattcgataccggtgacggcaagggtggaagccatcctcctgaggagattagagagggcaaagcgctactttttagatga

SEQ ID NO: 6952 - protein, 439 aa, Yarrowia lipolytica CLIB99
MKLGIKAKTGLGLVVAYTAYSTYVHLRTHYEINDRLDKKLKSTDFGLSSNVSLRDGIPPSVQFRPMVVGGKFVNPFSQYRHQTLFEFVYCNIVNLFHLTPRGGLPKDPKELKKLLPSVTPDFQLLSEPVKQVSALIPWKPKSFIPKPQDRITLTWIGQSCAFVQLGGLNILTDPFFGDHLVTSWMGPQRLSKAPCQFEDLPKVDIVLVSHDHPDHLEVDTVKKIGNSALWVVPLGVKKFLAKYGVYNVAELNWWETMGLETPKSQELGEKWTVACTPAMHWSGRKMYDANSTLWGSFMVMKDGKPHFFHAGDTGYSPELFRGIKEEYGPGCKLAMLPCGAYKPRWHLKSQHIDPQEAVNVMKDLEAKNMVGVHWGTFILSDEKFTEPRDSLHKIAEDAGVGNSVLAPKFGQTLVFDTGDGKGGSHPPEEIREGKALLFR

SEQ ID NO: 6953 - DNA, 1485 bp, Pan troglodytes
  CDS (1)..(1485)
atgtggccgttggtcgtcctgaagtgggtacatgatacatctgaggaaatagtttcgggccgtgtttatggagcagaggagagtgtggagagtggatttggactggctgtactttctgggggcattggttacagaatatcttcagtttcttcaccaaaggacatggatgaaaatgaaagcaaccagtctctgatgacaagcagccaatatcctaaagaagcagtaagaaaacgtcaaaattcagcacggaattccggaggaagtgattcttctaggttttctaggaaaagcttcaaactggattatagactagaagaagatgtaactaaatccaagaaaggaaaagatgggagatttgtgaatccgtggccaacatggaaaaacctctctattccaaatgttctcagatggctgataatggagaaagatcacagcagtgttccaagttctaaagaggaactagacaaagaactcccagtgcttaagccatattttatcactaaccctgaagaagctggagtgagggaagctggcttaagagtcacatggctgggacatgccacggtaatggtggaaatggatgagctcatatttctcacggatcccatctttagctctcgtgcttcaccatcgcagtacatgggtccaaagcgatttcgtcgttccccgtgcacaataagtgaactccctccaatagatgcggtccttatcagtcacaaccactatgaccatctggactacaattctgtcattgctttgaatgagcgatttggtaatgagttgagatggtttgtgcctttgggtctccttgactggatgcaaaaatgtggctgtgagaatgtgattgagttggactggtgggaggagaattgtgtccccggacatgataaggtcacctttgtctttacaccttcccagcactggtgtaaaaggactctaatggatgacaacaaggtgctatggggcagctggtctgtcttggggccttggaatcgattttttttcgcaggagatactggttattgccctgcttttgaagagataggaaaaagatttggaccttttgaccttgcagctattcccatcggagcttatgaaccgaggtggtttatgaaataccagcatgtagacccagaagaagctgtaaggattcacattgatgtccaaacaaagaaatctgtggcaattcactggggaacttttgccttagcaaatgagttgttttgtcccatggttatggggcatttttatctcccttctggactaaagtgcttggactgtgagctctcagtcactcagacgcctttcagacctacctccagggttatcttccagatggttgaaaacagcgaagaattgcattacttagagcctccagtgaagctgaatgaagctctagagagatacggacttaatgctgaagatttttttgtcttgaagcatggagaatcaagatacctaaataatgatgatgaaaacttttaa

SEQ ID NO: 6954 - protein, 494 aa, Pan troglodytes
MWPLVVLKWVHDTSEEIVSGRVYGAEESVESGFGLAVLSGGIGYRISSVSSPKDMDENESNQSLMTSSQYPKEAVRKRQNSARNSGGSDSSRFSRKSFKLDYRLEEDVTKSKKGKDGRFVNPWPTWKNLSIPNVLRWLIMEKDHSSVPSSKEELDKELPVLKPYFITNPEEAGVREAGLRVTWLGHATVMVEMDELIFLTDPIFSSRASPSQYMGPKRFRRSPCTISELPPIDAVLISHNHYDHLDYNSVIALNERFGNELRWFVPLGLLDWMQKCGCENVIELDWWEENCVPGHDKVTFVFTPSQHWCKRTLMDDNKVLWGSWSVLGPWNRFFFAGDTGYCPAFEEIGKRFGPFDLAAIPIGAYEPRWFMKYQHVDPEEAVRIHIDVQTKKSVAIHWGTFALANELFCPMVMGHFYLPSGLKCLDCELSVTQTPFRPTSRVIFQMVENSEELHYLEPPVKLNEALERYGLNAEDFFVLKHGESRYLNNDDENF

SEQ ID NO: 6955 - DNA, 1305 bp, Cryptococcus neoformans var. neoformans JEC21
  CDS (1)..(1305)
atgcttgctacaggtcttcacggtctcaagcgtgctgcaataatcctgccagtggcttggacaggaatttggctagggtattatgcgtacaccgatacccttcgcagggcacatatccgagaacgaaacaagaaactcatcaagacattagaaacattgccgggcggaggacctgatcatgcacagccagcaaccgagattgagcgaaatgcgttgaaagagcggtattcaagccttaaattcgctgggagatactggaatccgtatgtggaatggagagagcaaggggcttgggaatgggccctctggaaaggtgtcatttcgactctaactttgaagctcttctacaacggaggagtaccgccagatagacctatacctgacctcccggtagaacgcccggattttgatcttctctacccgtcttcatcttctgaaacaccaacgactcgtgaatcaggtagcggaggcagcgacatcgaaatcactgataaatacacctgcacatggcttggccaatcaacatcttacgtgactctcgataacctggccatccttacggatccggctcttcagcatcgcactattccgtctcgacttgcacctgaaagattacggccacctccctgcactttaagtgaacttaagagggttgacgttgtccttgtatctcacaatcactttgaccatctagaccccggtgccattttggaactaggtgacagctgtgaatggatcgtgcctgtagggtgtggtccttttttgcgcaagcatggggctactagagtgacagaactcgactggtggcaggaaaccaaacacacactctctcgacccggccaaaaggacaagacgtacacgattactgccgtgcccagcatgcattggtctgcccgttcccctctagatacgaatgccacactctgggccgcattccatgttaaatccgataccgacaaacccaaatcattcatccatctcggtgacactggatactcgcccacactgttccatgctgtaggccggataatgggcccagttgatcttgctgcaattcctattggctcttatgagccccgatggcacatgcatcttcaacatacagatcctgaaggggcagtcaggatggctttacagatgcacgttagaaaaagtattggtgtgcactggggaacatggatgatgagcgacgaagcttacaacaagcctcctttagatctagagcttgcaaggcagctgttggacgtcagtgaaaatcagttttcagtcgtaccagtggggaaaacaattgtccttgaagactga

SEQ ID NO: 6956 - protein, 434 aa, Cryptococcus neoformans var. neoformans JEC21
MLATGLHGLKRAAIILPVAWTGIWLGYYAYTDTLRRAHIRERNKKLIKTLETLPGGGPDHAQPATEIERNALKERYSSLKFAGRYWNPYVEWREQGAWEWALWKGVISTLTLKLFYNGGVPPDRPIPDLPVERPDFDLLYPSSSSETPTTRESGSGGSDIEITDKYTCTWLGQSTSYVTLDNLAILTDPALQHRTIPSRLAPERLRPPPCTLSELKRVDVVLVSHNHFDHLDPGAILELGDSCEWIVPVGCGPFLRKHGATRVTELDWWQETKHTLSRPGQKDKTYTITAVPSMHWSARSPLDTNATLWAAFHVKSDTDKPKSFIHLGDTGYSPTLFHAVGRIMGPVDLAAIPIGSYEPRWHMHLQHTDPEGAVRMALQMHVRKSIGVHWGTWMMSDEAYNKPPLDLELARQLLDVSENQFSVVPVGKTIVLED

SEQ ID NO: 6957 - DNA, 1251 bp, Danio rerio
  CDS (1)..(1251)
atggcagctcatacctcaggtcttctgctgggtcgcttacatcagaggcgcgctcgtgcgctcgcgacactcccaaaacagacgggcgcgagcttgaggcttgcagagttgacacatcgcaggtgtttgtgcagttcagctgcaggtggggtgtccatggcagagcaacctttagttggtgcaagtagcagcaccccgctggattacagacaggaggcagatgttacctgttccagacgggactcccaagggcgctttgtgaacccttggtcaacttggcatttcccctcctacactaccgttgctcgcctattcctcactgagaagaacaacagtaagattcccagtgccaaagaggctctggaccgtgagttgccaattgtgcagccatatttcatccagaatccagatcaatgtggccaaacaggcacatcagtgcgagcaacgtggctcggtcatgccactgtactggtggaaatggagggactgctggttctcactgatcccatattcagccaaagagcttcaccagtggcttttatgggccccaagcgctaccgtgacccgccatgcaccatagaacagcttcctcgcctggatgctgtggtgatcagtcacacacactatgatcacctggatgcagcctctgtgactgctctgaattctcgctttggctctgctctgcactggtttgtgccgctcgggcttgcagaatggatgcagaagacaggctgtgagaatgtcacagagctggactggtgggtcgggagccgaattcctgggcacgataatgtcagctttttttgcaccccagcacagcactggtgcaaacgtacacctgtggatgacaacaaaacattatggggaagctggagcatcgtagggtcccattcccgcttcttttttgctggagatacgggatactgtgcatcatttaaggaaatcggaagacactttggaccatttgacttggctgcaatcccaattggagcatatgtgcccagaggcatcatgaaatctcagcatgttgatcctgaagaggctgttcaaattcacatcgacgttcaagcaaaagcatctctggccattcactggggaacgtttcctttatcctatgagcattatcttgaacctccagcacgactgcgtgaggcaatggtgaatcttggacttaatccagatgacttcttcacacttcatcatggagagtcacgcatgatcaacctcaaggacatgcactcatccagctaa

SEQ ID NO: 6958 - protein, 416 aa, Danio rerio
MAAHTSGLLLGRLHQRRARALATLPKQTGASLRLAELTHRRCLCSSAAGGVSMAEQPLVGASSSTPLDYRQEADVTCSRRDSQGRFVNPWSTWHFPSYTTVARLFLTEKNNSKIPSAKEALDRELPIVQPYFIQNPDQCGQTGTSVRATWLGHATVLVEMEGLLVLTDPIFSQRASPVAFMGPKRYRDPPCTIEQLPRLDAVVISHTHYDHLDAASVTALNSRFGSALHWFVPLGLAEWMQKTGCENVTELDWWVGSRIPGHDNVSFFCTPAQHWCKRTPVDDNKTLWGSWSIVGSHSRFFFAGDTGYCASFKEIGRHFGPFDLAAIPIGAYVPRGIMKSQHVDPEEAVQIHIDVQAKASLAIHWGTFPLSYEHYLEPPARLREAMVNLGLNPDDFFTLHHGESRMINLKDMHSSS

SEQ ID NO: 6959 - DNA, 1326 bp, Candida albicans SC5314
  CDS (1)..(1326): transl_table=12
atgcttcaaccgttatcaattaagtctaaactaggtttgggcttgcttttatcatatacttcatatgaggtttatatgcaagtgaggactcaatacattatcaaagcaagaaaagaagagtacaagaatttagaaaatggaactgatattgatatatctaaatttagatcgacttctgttggaggaatgtttgtcaacccatttgaggaatatcgtccccagacagcatttgagtttattttagtgaggattatgcaactttttgaaagtgtttatggtaatacgatcgagcttcataaaaaactcccacagccacatgatggtgccgttgaagtggaagatattttaaaagtattcaagcctgatttagagagatttagaaagaattcagaagttttaaaaaagtgcatagaaagcaataatttcctgcaattaaaagtaaagccaagttggtttaattcgattcccttgcatcaacaattacttttcacttggttgggtcaatcttgcaccttgtttcaaattctgggagttaattttttaactgatcctataattagtgaacacttgatcactccatctataggacccaaaagattgactcgttccccaatggatttggaccagattaaatttgcaactaatgacagcttgaattttgttttggtatcacacgatcaccctgaccatttagaattggatttagctgggaaaatcaaaaatacaacaacttggattgtaccccttggcttgaagtcgaaattggctcgtaaaggtatatataaagttattgagatggactggtgggatacaatagacattactaattatatcagtgataatttgtctgacaagtatgaaatcgagtgtgttccttctatgcattggtccggtagatatgtgattgattctaaccaatctttgtggtgctcgtatgtgattaaacgtaacggagaatcactagtgtatcatgcgggagatactggttatctgaaagaactatttgatgttataggtaaacgatgcggtccaataaagttggcattgttaccaataggtcaatattgtcctagctggcaccaaaagcctcgccacatttcaccagaagaggccttgcgtatttgctcgcaagtgcaggcatcatttatgaaaggtgttcactgggggacattcaagttgagtggagaaccaattttagaaccaaagaatttattgactgagctagcccaaaagattggaaaggcggaaacttatagagttccagaatttggtttgacatatctttttgatttacaaaacaatactgagacagagattcatgtttag

SEQ ID NO: 6960 - protein, 441 aa, Candida albicans SC5314
MLQPLSIKSKLGLGLLLSYTSYEVYMQVRTQYIIKARKEEYKNLENGTDIDISKFRSTSVGGMFVNPFEEYRPQTAFEFILVRIMQLFESVYGNTIELHKKLPQPHDGAVEVEDILKVFKPDLERFRKNSEVLKKCIESNNFSQLKVKPSWFNSIPLHQQLLFTWLGQSCTLFQISGVNFLTDPIISEHLITPSIGPKRLTRSPMDLDQIKFATNDSLNFVLVSHDHPDHLELDLAGKIKNTTTWIVPLGLKSKLARKGIYKVIEMDWWDTIDITNYISDNLSDKYEIECVPSMHWSGRYVIDSNQSLWCSYVIKRNGESLVYHAGDTGYSKELFDVIGKRCGPIKLALLPIGQYCPSWHQKPRHISPEEALRICSQVQASFMKGVHWGTFKLSGEPILEPKNLLTELAQKIGKAETYRVPEFGLTYLFDLQNNTETEIHV

SEQ ID NO: 6961 - DNA, 1725 bp, Strongylocentrotus purpuratus
  CDS (1)..(1725)
atgctgccagtatctcatcagtttttctactgtgatgcggatgtataccacagatcagcgtatacgtcatcattgaagctgccatgtgatccagatccagaccctgacccactagcctgtctggaagccttaggaccaacctcatcctttctggattccttcgaggccttagacttcattgactctgagagcgtcaccactcagggaagcaaggagaacctcttagacgttgatgactacacatcagtttacagagaaacattggattccaacaagctcaaccaattgaacaataacacagtgtatgcggacatatcagaacctccctaccaaagcatcgacagagcgtggttgaaatcaggacgcaaagccatggcgatggccaacacaaaccaaagcaaccaaacgcagtctgtggccatcatcgaagatgaccctttgaaccctgactatgctgcagtgaagcatgtggtcaccttctcagaaccccacacccctcctctcccaatcagagaaatatcaatcggagacacaccccctgaacttccccctctagaggtcaggagaagacccccttcagacacccactcccaatcctcaccacgatccagcaaaagcaatagtggttcagactttgatattaacaccagcaggactaaagtgatttgtaatgatagggtcaagtttgggtcattggatccaaggaagctagaggatgtgacaccatcgaggttcaggaatggtcgttatgagaacccttgggaaacatggtccatgccttcctttggcaatgtacttaagtggtggctctttagtaaaaacaacagcaatgtgccatcaaaatcgacgctagagaagaccttaccagtgctaaaaccagcccatgatgagatcaaagttccacccatctctggagtacgtgtcacatggattggccatgcaacagctctcgttcagtttgacggtatctcagtgctaaccgatcccgtcttcagcgatcgctgtggtcccatgtcatggatgggcccaaagaggtatcgaccccctccgtgccaggtcaaagacctccctaagattgatgccgtcgtcatcagccactcgcactttgaccaccttgatgcgccttctgtgtctgccctcaatgcaaggtttggatctgatctaaggtggtttgtaccgctaggtgtcctagactggatggccggcatgggatgtgagaatgtcatcgagatggactggtggcaggagaactgcatcccgacccacagcgacgtcacattcgccttcactccggctcaacactgggggcagcgtacacccacggacaggttcaagacgttgtggggctcctggtgcatcatgggaccaaacaacagcttcttctttgccggtgacactggctactgtcgagggtttgaagagatagggagacgttatggcccctttgatctagctgctataccgattggagcttatgagccaagattttttatgactcctcagcatgttaatcctaccgaagccgtccaaatccacgaagatgtcaatgctagaaaatccattggcatccattggggcacctacactctaaccaacgagcattatctggacccgcccaaggaaatgaaaaaggccctcgagagcaaagggctccctctggaggatttctttgtaatgaagcatggtgagtcaagactactgctagaagaaatggaaatggactga

SEQ ID NO: 6962 - protein, 574 aa, Strongylocentrotus purpuratus
MLPVSHQFFYCDADVYHRSAYTSSLKLPCDPDPDPDPLACLEALGPTSSFLDSFEALDFIDSESVTTQGSKENLLDVDDYTSVYRETLDSNKLNQLNNNTVYADISEPPYQSIDRAWLKSGRKAMAMANTNQSNQTQSVAIIEDDPLNPDYAAVKHVVTFSEPHTPPLPIREISIGDTPPELPPLEVRRRPPSDTHSQSSPRSSKSNSGSDFDINTSRTKVICNDRVKFGSLDPRKLEDVTPSRFRNGRYENPWETWSMPSFGNVLKWWLFSKNNSNVPSKSTLEKTLPVLKPAHDEIKVPPISGVRVTWIGHATALVQFDGISVLTDPVFSDRCGPMSWMGPKRYRPPPCQVKDLPKIDAVVISHSHFDHLDAPSVSALNARFGSDLRWFVPLGVLDWMAGMGCENVIEMDWWQENCIPTHSDVTFAFTPAQHWGQRTPTDRFKTLWGSWCIMGPNNSFFFAGDTGYCRGFEEIGRRYGPFDLAAIPIGAYEPRFFMTPQHVNPTEAVQIHEDVNARKSIGIHWGTYTLTNEHYLDPPKEMKKALESKGLPLEDFFVMKHGESRLLLEEMEMD

SEQ ID NO: 6963 - DNA, 1044 bp, Leptospira interrogans serovar Copenhageni str. Fiocruz L1-130
  CDS (1)..(1044): transl_table=11
atgaaacatattttcctttttattattttattatttctttttgaaacctgttttccaatcgatccagagagaattcgttcttctcattttcaggatggaaagtatcacaatattgaagaagatgtaagactgaataaaaattttttttcggtcttacgttggaaaattttaggacctaaggatccgcctacagtagagggagatctggaaaaaattccggatgtaatccctataaaaaaagaggatttacttgctcccgagggtaaagtgagaattgtctggcttggacatgcaacggtatggatcgcttctcattttcacggtaaaagaatgcacattcttacagatccgatatttactggagttcctccttttgttaagcgacttactaaacttccgatcgaaccagaaaatcttcccggagtggacattgtagtgattagccacgcgcacagagatcatttggatatagattcgattcaaaagatacaaaagttatttccggaagttacagttcatcttccttctggaatgggtgaatttgcaagggacgaaggacttgaaaatgcggtaatacaagagtggtggacgattacagaatatgcgggaaccaaaattcactttcttcccgcaaaacattggagcagaatgggacttaccgatatgaatcaatatcattggggaagttacgcattcgaatttgagaatattagaatatactttggtggtgatactggattttcaaaacacttttcggaaattgggaaacgttttgcccagggattttcagcgaccatacttcccataggagcgtttaaacctagatggtttatggaacctgctcatataggacccaaggaagcattagaggcaagttctattcttcattcttctttgatccttccggttcattgggggacattcgcgcttggagacgaccttccttcggaggctccactttatcttaaaaaattacattctgagaaaaaagataagttaccggctctacgagtttggacgatgggtgaaattgtagatttgtga

SEQ ID NO: 6964 - protein, 347 aa, Leptospira interrogans serovar Copenhageni str. Fiocruz L1-130
MKHIFLFIILLFLFETCFPIDPERIRSSHFQDGKYHNIEEDVRLNKNFFSVLRWKILGPKDPPTVEGDLEKIPDVIPIKKEDLLAPEGKVRIVWLGHATVWIASHFHGKRMHILTDPIFTGVPPFVKRLTKLPIEPENLPGVDIVVISHAHRDHLDIDSIQKIQKLFPEVTVHLPSGMGEFARDEGLENAVIQEWWTITEYAGTKIHFLPAKHWSRMGLTDMNQYHWGSYAFEFENIRIYFGGDTGFSKHFSEIGKRFAQGFSATILPIGAFKPRWFMEPAHIGPKEALEASSILHSSLILPVHWGTFALGDDLPSEAPLYLKKLHSEKKDKLPALRVWTMGEIVDL

SEQ ID NO: 6965 - DNA, 951 bp, Parachlamydia sp. UWE25
  CDS (1)..(951): transl_table=11
atgtcttcaaatcattttgatgggaattattattttaatcctttcaatttttctacccattcattttggcaagtcctcaaatggatgataacaagaaaacctgttaagtggccagaatcagtttctgttaatcagcaaaaaaagttaaaagaacgcgtttcctctgatgagctagaggtcacttatgttacccattcaacagttcttattcagattgatgggaaaaatattttaacagacccgatttggtctgaaagagcgagtcctttctcttatattgggcctaaaagagtttctttaccaggtattcaatttaaggatcttcctccaatagactttgtgcttatcagccataaccattatgaccatatggacatgcctacacttcaaaagttgcaggtagattattctcctgttttttatgtccccatgggaaatcaaaggtttttgcgtagtaaggggttaaaaaaagttttagaaatggattggtgggatgaagtttctctctattcgtctaatcagctcatttttgttcctgctcaacatttttcggcacggggcctatttgatcgtaatcgaactctctggggtggttttatgattaaaacatctaatcaaagtgtttactttgccggagattctggctatgggccacattttaaggcaataagatcacggttaggagctccgacattagcttgtttacctattggggcttatgaaccaaggtggataatgcaatcaattcatctatctccagccgaagctcttcaagctcatctagatttaaacgccaagcaaagtttagcgattcactttggaacctttcagttaacagacgaagggattaaagagcccgttaaaatacttcgccaagagatgcaaacgaagcaaatcccattcgaacaattttgggtattaaatcctggggaatgtaagcaaatttattaa

SEQ ID NO: 6966 - protein, 316 aa, Parachlamydia sp. UWE25
MSSNHFDGNYYFNPFNFSTHSFWQVLKWMITRKPVKWPESVSVNQQKKLKERVSSDELEVTYVTHSTVLIQIDGKNILTDPIWSERASPFSYIGPKRVSLPGIQFKDLPPIDFVLISHNHYDHMDMPTLQKLQVDYSPVFYVPMGNQRFLRSKGLKKVLEMDWWDEVSLYSSNQLIFVPAQHFSARGLFDRNRTLWGGFMIKTSNQSVYFAGDSGYGPHFKAIRSRLGAPTLACLPIGAYEPRWIMQSIHLSPAEALQAHLDLNAKQSLAIHFGTFQLTDEGIKEPVKILRQEMQTKQIPFEQFWVLNPGECKQIY

SEQ ID NO: 6967 - DNA, 975 bp, Bacillus anthracis str. Sterne
  CDS (1)..(975): transl_table=11
atggcaaagcgctatgaaaatatggataatgttagcacaaaaaaatcaattcgctcttttatacgctggcgtaaagaacgaaagcaaaacaaaaaagatttttctttcttagtagaacaatcacccgttaaacaaagtgcatttttgcaaaataatgttaaaaaaacgactgtcacatggattgggcattccacttttcttatccaaacgaatggacttaatatattaacggatccagtatgggccaataaattaaaattagtcccaagacttacagaacctggactttctataaaagaactacctaaaattgatatcgttcttctttcacatggccattatgatcacttagatttttcaacactccgccagctgaacgatgacgtattatacttagtgcccatcgggttaaaaaaattatttactcgtaaaaaattcaacaatgtagaagagtataaatggtgggaaagtacgactattgataatgtttcctttcacttcgtacctgctcagcactggacgagaagatcattatttgatatgaatacatctcactggggtggatggattattaagaatgacaatatggaggaaaccatttatttttgcggagatagtggttatttccaaggcttcaaagaaattggcaaacgcttttcaattgatattgcccttatgccaattggagcttatgaaccagaatggtttatgaaaatatctcacgtttcacctgaagaagcagtgcaagcttatttagatttacatgctacacactttataccaatgcattacggggcttttgcactcgctgatgaaacacctcgcgaggcaataacaaggcttcgaaataattggaatttacgtatgttaccgtgggaacaactgcatgtactctttttaggtcaaactttcacttataatagcgaaacacctactaaaaaagtgaatgaaaaaattgaaacgttacatgtataa

SEQ ID NO: 6968 - protein, 324 aa, Bacillus anthracis str. Sterne
MAKRYENMDNVSTKKSIRSFIRWRKERKQNKKDFSFLVEQSPVKQSAFLQNNVKKTTVTWIGHSTFLIQTNGLNILTDPVWANKLKLVPRLTEPGLSIKELPKIDIVLLSHGHYDHLDFSTLRQLNDDVLYLVPIGLKKLFTRKKFNNVEEYKWWESTTIDNVSFHFVPAQHWTRRSLFDMNTSHWGGWIIKNDNMEETIYFCGDSGYFQGFKEIGKRFSIDIALMPIGAYEPEWFMKISHVSPEEAVQAYLDLHATHFIPMHYGAFALADETPREAITRLRNNWNLRMLPWEQLHVLFLGQTFTYNSETPTKKVNEKIETLHV

SEQ ID NO: 6969 - DNA, 963 bp, Bacillus anthracis str. Sterne
  CDS (1)..(963): transl_table=11
atgaaaaagaaatttataaatcaaattcatactgatgtaagttttaaaccgaaagatattataggtttaatgactgattacttaaaaacgaagacaaagctacgtcctataaagaatttaccgattgttttatcaaataaagataatgaatctttagagagtttgacatggtttggccattctgcttctcttttaaaaatagaaggtaaaaaattgttattagacccgatgtttggagatacctcttccccgtttcctctgtttaatagtaaacgttatagcggtaccttttctttagaacgtgaagaccttcaagaaattgatgcgattatcatttctcataatcactatgatcatttaaattataaaagtattatgcagttaaaagatcgcacaaagcacttttatgttccaactggagttgcacaatatcttattaaatggggtatttcacctagtaaaattagtgagcataattggtgggacgaaattgcgtttgataatattaagttagtatgtactcctgcaaggcatttctctggacgaggtatgacagatagagattgttcattatggtgttcatggcttattcttggtcaagagactaaaattttctttagtggtgatagcggttatgcccctcactttaaggaaattggtgataaatatggtccattcgatcttacattgatggaatgcgggcaatatgatccaaggtggtctgcaattcatatgttacctgaagaaacagtacaagctcatattgatgtaaaaggagaattacttcttccgattcattggggtgcttttacattagcattacacgaatggagtgacccaatagaacgtgttacgaaggaagcgaaccgtttaggagttaaaattacaacacctcaaattggcgaatctattacgttaaaatctacagactatcctaggtatgcttggtggcaaaaagtctaa

SEQ ID NO: 6970 - protein, 320 aa, Bacillus anthracis str. Sterne
MKKKFINQIHTDVSFKPKDIIGLMTDYLKTKTKLRPIKNLPIVLSNKDNESLESLTWFGHSASLLKIEGKKLLLDPMFGDTSSPFPLFNSKRYSGTFSLEREDLQEIDAIIISHNHYDHLNYKSIMQLKDRTKHFYVPTGVAQYLIKWGISPSKISEHNWWDEIAFDNIKLVCTPARHFSGRGMTDRDCSLWCSWLILGQETKIFFSGDSGYAPHFKEIGDKYGPFDLTLMECGQYDPRWSAIHMLPEETVQAHIDVKGELLLPIHWGAFTLALHEWSDPIERVTKEANRLGVKITTPQIGESITLKSTDYPRYAWWQKV

SEQ ID NO: 6971 - DNA, 414 bp, Bacillus thuringiensis serovar konkukian str. 97-27
  CDS (1)..(414): transl_table=11
atgacagatagagattgttcattatggtgttcatggcttattcttggtcaagaaactaaagttttctttagtggtgatagtggttatgcgcctcattttaaggaaattggtgacaaatatggtccattcgatcttacattgatggaatgcgggcaatatgatccaaggtggtctgcaattcatatgttacctgaagaaacagtacaagctcatattgatgtaaaaggagaattacttcttccgattcattggggtgcttttacattagcattacatgaatggagtgacccaatagagcgtgttacgaaagaagctaaccgtttaggagttaaaattacaacgcctcaaattggcgaatctattactttaaaatctacagactatccttcatcagcttggtggagagaaatttaa

SEQ ID NO: 6972 - protein, 137 aa, Bacillus thuringiensis serovar konkukian str. 97-27
MTDRDCSLWCSWLILGQETKVFFSGDSGYAPHFKEIGDKYGPFDLTLMECGQYDPRWSAIHMLPEETVQAHIDVKGELLLPIHWGAFTLALHEWSDPIERVTKEANRLGVKITTPQIGESITLKSTDYPSSAWWREI

SEQ ID NO: 6973 - DNA, 1053 bp, Acinetobacter sp. ADP1
  CDS (1)..(1053): transl_table=11
atgaaagagaagccgacattaacttatcaattgccgactaaatcttgtttgacccatacatggagtaagccttcttttcattatgtagattctgagcaagcggggccagcccgtttctataatcaggtgaaacgtccgtctgcgcgtggttcgactgaacttctgcgttggttagcgacgcgtgaatcatacacatggcaggtcgacatatctcgtgaatatgagctgcgccttaacacgcctattgccattccacaaaatcggccacatgccagcttagacgactggcaagtatggtttgttggtcatgcaacagtactgcttcagattgggccatataattttattaccgatccagtctggtgcgaatatgccagtcctcaccaaggtcgtggcccgcgtcgggtttgcccagcaggaattgcactggaacacttgcccacaattcacgccgtgttgctcagccacaatcattatgatcatatggatctggcgacactggaatggctacatcgtaaattcgcaatgcccatctatactggattaggaaatcaatattatttacccaaagactatcatgtgattgagatggactggtggcagatgatcccgtttcacgatctcaccattatgtatacgccagctcaacacggttcaggtcgtggtatacgtgatcaaggcaaagccttgtggggtgggttttcagttattgcagaatcaggtcacgctttttttgctggcgacacaggttatgggccacattttaaagaaatttatgagcgttgtggtgcccctcgaattgcattgttaccaatcggagcctatgaaccgcgcgatttgatgcagtatgtccatatgaatccacaagatgctctgcatgcacatctagatttacatgcacaacgaaccatggcaattcattatcgaacatttcagctcacagatgaacatcgtgatgatccagagcgtgaacttacgcatctgttaaaaacctcatctaaattggtcaatccattttactgtatccgtgaaggacataagctcactgtttaa

SEQ ID NO: 6974 - protein, 350 aa, Acinetobacter sp. ADP1
MKEKPTLTYQLPTKSCLTHTWSKPSFHYVDSEQAGPARFYNQVKRPSARGSTELLRWLATRESYTWQVDISREYELRLNTPIAIPQNRPHASLDDWQVWFVGHATVLLQIGPYNFITDPVWCEYASPHQGRGPRRVCPAGIALEHLPTIHAVLLSHNHYDHMDLATLEWLHRKFAMPIYTGLGNQYYLPKDYHVIEMDWWQMIPFHDLTIMYTPAQHGSGRGIRDQGKALWGGFSVIAESGHAFFAGDTGYGPHFKEIYERCGAPRIALLPIGAYEPRDLMQYVHMNPQDALHAHLDLHAQRTMAIHYRTFQLTDEHRDDPERELTHLLKTSSKLVNPFYCIREGHKLTV

SEQ ID NO: 6975 - DNA, 1065 bp, Erwinia carotovora subsp. atroseptica SCRI1043
  CDS (1)..(1065): transl_table=11
atgcttttgttactcgttttggctgtgattgcagtcgccgtttacggctggttaaaacagccgcaatacgtttcaccagaggtaaaacctcaaccggaaaacccactctttcgcgatggcgcgtttcataacccggtagcccgcccgacggtagatagccagaaccggttcgggttgctgtaccgctttcttttcgagaaagacgctggcgcgttacccgatacccacctgctgtcggaaaagaccgatctgcatcagttaagtaaaacggataacgtcatcatctggatggggcattccagctactttattcaattggatgggaaaaccttcctgctggatccggtatttagtgacaacgcctcgccggtgccgcgtactaatatcgccttcaaaggcagcaatgtgtattcaccggaagacattccagaaatcgactatctgttgatcactcacgatcactgggatcatctggattaccctacgttgaacgcgctacgtggaaaaatccgtcgtattgtcacgccgaccggtgtgggttcctattttgtaaaatggggcttccctcggaaagatattacggaaggtgactggttcagcagcttgaaagagaacggggtggaaattcacgtgctgccgacgcagcatttttccggtcgactcctcaagcataaccaaacgctgtggggctcatttgcgctgataacggcgcagcatcgcctgtatctcggtggtgacagcggctatggtgcgcactacaaagagatcgccgagcgtttgggtggattcgatatcgcgatactggaatgcggccaatacgacagtgactggccctacgttcacatgacgccggaagagagcgcacaggcggcgagtgacttgcacgccaaagcggtgttaccgagccacaacagcaaatttaagctggcgcaccaccgctggaacgatccattggagcgcatttctcaagccagcgaaaatcagggctggcgattaatgacgccccgtattggtgaacgtgtacaggtcgataatccgcagcagatttttagtcagtggtggtaa

SEQ ID NO: 6976 - protein, 354 aa, Erwinia carotovora subsp. atroseptica SCRI1043
MLLLLVLAVIAVAVYGWLKQPQYVSPEVKPQPENPLFRDGAFHNPVARPTVDSQNRFGLLYRFLFEKDAGALPDTHLLSEKTDLHQLSKTDNVIIWMGHSSYFIQLDGKTFLLDPVFSDNASPVPRTNIAFKGSNVYSPEDIPEIDYLLITHDHWDHLDYPTLNALRGKIRRIVTPTGVGSYFVKWGFPRKDITEGDWFSSLKENGVEIHVLPTQHFSGRLLKHNQTLWGSFALITAQHRLYLGGDSGYGAHYKEIAERLGGFDIAILECGQYDSDWPYVHMTPEESAQAASDLHAKAVLPSHNSKFKLAHHRWNDPLERISQASENQGWRLMTPRIGERVQVDNPQQIFSQWW

SEQ ID NO: 6977 - DNA, 1143 bp, Desulfotalea psychrophila LSv54
  CDS (1)..(1143): transl_table=11
atgtcggcccggctcttaggggtagcgcatcgaactatgaaaaatttattgactatcattggcgcagcactctttttaattctcaccttaggatattctgtcatgcctgcagaaagcaatgacgaaactatgggaagggccccacatcacaccacctacggatttcaaaattatccccctgtgcagacagccgctcctaaaggtctgccgttctacctgcgcagactttggagctctatctttcttccttccatcccgaatggacattgggtacctgaagcagaggcgatgaaatcgctcagttccattggtggcgatcggataacctggctggggcatgcaagctttcttatcagggtttcaggtaaaacgatactgacagatccgtttttgacggaatttgccagccctctttcctgggcgggccccaggcggtttgcaggagcgggaatccccatggataggctgccgccgatagatattattattgtttcacatgatcactatgaccacctggacgatgaatccgttcgctgtttagataaagataaaattgaggttgtagtccccctgggcttaaaatcgtttttcagtgaacggggatatgggagggtaacagagttagactggaacgaatcaatcgcacttggcgagctgacattaactgccctacctgccattcacaattcaggacgaagtataaaaaatcgcaatcaaaccctgtgggcatcgtggctgatagagagttctaccaaaaaaatgctctttgtcggtgacaccggatattccgagacaatattcaaactgatcggcaggcagtatggtccacttgactacgccattctgcccatcggtgcctatgcacccagaaaactgatgaggatgtcacatatcaaccccgaagaggcagttaccgtcggcaatgaaattcgggcattcaccctgatagcctcacactggggaacaattggtttgtcggatgagccgacctgggaaccgccaaaacggtttagcagggccgggcttgataatggcctttctgaggagaggctttggattatgaaaattggcgaaacacgtcctcttggccagtccggtttgtctcaggggttaaagaaaacaggagatgtccttcctaaatga

SEQ ID NO: 6978 - protein, 380 aa, Desulfotalea psychrophila LSv54
MSARLLGVAHRTMKNLLTIIGAALFLILTLGYSVMPAESNDETMGRAPHHTTYGFQNYPPVQTAAPKGLPFYLRRLWSSIFLPSIPNGHWVPEAEAMKSLSSIGGDRITWLGHASFLIRVSGKTILTDPFLTEFASPLSWAGPRRFAGAGIPMDRLPPIDIIIVSHDHYDHLDDESVRCLDKDKIEVVVPLGLKSFFSERGYGRVTELDWNESIALGELTLTALPAIHNSGRSIKNRNQTLWASWLIESSTKKMLFVGDTGYSETIFKLIGRQYGPLDYAILPIGAYAPRKLMRMSHINPEEAVTVGNEIRAFTLIASHWGTIGLSDEPTWEPPKRFSRAGLDNGLSEERLWIMKIGETRPLGQSGLSQGLKKTGDVLPK

SEQ ID NO: 6979 - DNA, 1029 bp, Yersinia pseudotuberculosis IP 32953
  CDS (1)..(1029): transl_table=11
atgttggctgcaacagcggttggcagtaaaggacgtaaaatggcgaagaaaaacccctattatgatgccagcaagccacatcacacagagtttggatttcagaatatagaaccggttgttcatcatccgcaggatttgaaacgctggcgtgaagagagaaagcgccagtcgctgcctaagccgcctcaacagggctacccgcagttcgttacagattggtggcaacaagctgacttttcagggcagcaagatgcgttgtggtggcttggccatgcttcattattgttacgtatcagtgggcaggcggtgttgtttgaccctgtgctttcaagccgggtttcaccggttaatttttatggcccacagcgcaaaacaccaatacccgccagcgtacagcaactgcccgatattgatgtgatcgtgatctctcataatcattacgatcacttggatgtcacgactatcacgcaattattgcgccgtttccctgacgtggtgtttttggtcccattagggctgaaaaactggttgcggcagcatggtgctcgccatgttcatgagttggattggtgggatcaacggctcgtcgctgactttgagttccattgtgtgcccgcccgtcattggagtatgcgcactccttgggatcggaatcacagtttgtggtctggctgggtagtgaagcggggcgaagttaacttttatttcagtggtgatactggctattgccagcaattactggatatcggtgaggcactggggccattcaattatgcggcactgccaattggtgcttatgcaccacgctggtttatgcaggcgcaacatatggatccacaacaatcggtgcaattgtttcaaaaattacaccaaccggtgacgatcccgattcattggggggtctttgaactggctgatgagccattggatgaaccaccagaacaacttcaacaggcgttaaccgatgccggagtggcgcacaataaattcgtaccaattaaaataggtgcacggatcatactggaatag

SEQ ID NO: 6980 - protein, 342 aa, Yersinia pseudotuberculosis IP 32953
MLAATAVGSKGRKMAKKNPYYDASKPHHTEFGFQNIEPVVHHPQDLKRWREERKRQSLPKPPQQGYPQFVTDWWQQADFSGQQDALWWLGHASLLLRISGQAVLFDPVLSSRVSPVNFYGPQRKTPIPASVQQLPDIDVIVISHNHYDHLDVTTITQLLRRFPDVVFLVPLGLKNWLRQHGARHVHELDWWDQRLVADFEFHCVPARHWSMRTPWDRNHSLWSGWVVKRGEVNFYFSGDTGYCQQLLDIGEALGPFNYAALPIGAYAPRWFMQAQHMDPQQSVQLFQKLHQPVTIPIHWGVFELADEPLDEPPEQLQQALTDAGVAHNKFVPIKIGARIILE

SEQ ID NO: 6981 - DNA, 1038 bp, Bacillus licheniformis ATCC 14580
  CDS (1)..(1038): transl_table=11
atgatgtttttattcatttttatcatcatcttagctgcggctgttttattgttcatcaatttacatcctgtgtttggaggaaatccaagcaaggaacaaaaaaagctgtatcaaagctttgacaattatgccgatggcaaatttcttaatcaaacacaagaaaagatggatatgggcggaatatccggagttttctcaatgatgagagacgctgtttccggcggcaaggagcgcaatccttccgatcaaatccctgtttctgagattgattggaacatcgttaaaagtaacgaagacagcttaacatggtttggacattccgcttttttactgagcatcgaccgcaaaaaaatactcgtagaccctatgctgggtccaattgcttcacccgtatcattcatcggaagcagacgctacagcgaagacatcctgcatacggtcaatgatatgccgccgattgacgccgtcttgattacacatgaccattatgatcacttagattatccatccatcttaaagctgaaggaaaaggccggtcatttcttcgttccttacggaatcagcgcacacttgatccggtggggaattgagaaagaaaaaatcaccgaactcaattggtgggatgaaacggagtttcaaggtttgacaatagccctgacaccgtccaaacacttttcaggcagaggattattgaatcgaaacacgaccctgtggggcggctgggtcatcctcggaaaacatacgcgtttttatacgagcggtgacgggggatatgatgaacactttaaggaaatcggcaaaaaatacggccctttcgatatcacattaatggaaggcggccaatatgacagacgctggtccgggattcatatgacacccgaacaatctgtacaagcccataaagatgtaaaaggaaagaacatgatgttgattcattggggagcctttaccctcgcataccacggctggaaagagccgattgaacgcgcattgaacagccaatactcgcttcccgaaaccttttggtgggatatataa

SEQ ID NO: 6982 - protein, 345 aa, Bacillus licheniformis ATCC 14580
MMFLFIFIIILAAAVLLFINLHPVFGGNPSKEQKKLYQSFDNYADGKFLNQTQEKMDMGGISGVFSMMRDAVSGGKERNPSDQIPVSEIDWNIVKSNEDSLTWFGHSAFLLSIDRKKILVDPMLGPIASPVSFIGSRRYSEDILHTVNDMPPIDAVLITHDHYDHLDYPSILKLKEKAGHFFVPYGISAHLIRWGIEKEKITELNWWDETEFQGLTIALTPSKHFSGRGLLNRNTTLWGGWVILGKHTRFYTSGDGGYDEHFKEIGKKYGPFDITLMEGGQYDRRWSGIHMTPEQSVQAHKDVKGKNMMLIHWGAFTLAYHGWKEPIERALNSQYSLPETFWWDI

SEQ ID NO: 6983 - DNA, 1272 bp, Bacillus cereus E33L
  CDS (1)..(1272): transl_table=11
atgtttatcataacaaaagttaacactacgagaaaattgtttactacatttgttcacgaaatcgtacgaatttacgtatgttacttctttatttcaagcgaattactagacaaaatatattttttcactattatttctctaaatagaagttgcaaaactaattttattgttatttttgtaaatgcacccctctattttttttacaattacttaaacattcatccatgttatacactgtattccttaacaacatttcggtacaatataattacaacgattttaaatgaggtgatgttcatggcaaagcgctatgaaaatatggataatgttagcacaaaaaaatcaattcgctcttttatacgctggcgtaaagaacgaaagcaaaacaaaaaagatttttctttcttagtagaacaatcacccgttaaacaaagtgcatttttgcaaaataatgttaaaaaaacgactgtcacatggattgggcattccacttttcttatccaaacgaatggacttaatatattaacggatccagtatgggccaataaattaaaatttgtcccaagacttacagaacctggactttctataaaagaactacctaaaattgatatcgttcttctttcacatggtcattatgatcacttagatttttcaacacttcgccaacttaacgatgacgtattatacttagtgcccatcgggctaaaaaaattatttactcgtaaaaaattcaacaatgtagaagagtataaatggtgggaaagtacgactattaatgatgtttcctttcacttcgtacctgctcagcactggacgagaagatcattatttgatatgaacacatctcactggggtggatggattattaagaatgacaatatgggggaaaccatttatttttgcggagatagtggctatttccaaggtttcaaagaaattggcaaacgcttttcaattgatgttgcccttatgccaattggagcttatgaaccagaatggtttatgaaaatatctcacgtttcacctgaagaagcagtgcaagcttatttagatttacatgctacacactttataccaatgcattacggagcttttgcactcgctgatgaaacacctcgcgaggcaataacaaggcttcgaaataattggaatttacgtatgttaccgtgggaacaactgcatgtactctttttaggtcaaactttcatttatgatagcgaaacacctactaaaaaagtgaatgaaaaaattgaaacgttacatgtataa

SEQ ID NO: 6984 - protein, 423 aa, Bacillus cereus E33L
MFIITKVNTTRKLFTTFVHEIVRIYVCYFFISSELLDKIYFFTIISLNRSCKTNFIVIFVNAPLYFFYNYLNIHPCYTLYSLTTFRYNIITTILNEVMFMAKRYENMDNVSTKKSIRSFIRWRKERKQNKKDFSFLVEQSPVKQSAFLQNNVKKTTVTWIGHSTFLIQTNGLNILTDPVWANKLKFVPRLTEPGLSIKELPKIDIVLLSHGHYDHLDFSTLRQLNDDVLYLVPIGLKKLFTRKKFNNVEEYKWWESTTINDVSFHFVPAQHWTRRSLFDMNTSHWGGWIIKNDNMGETIYFCGDSGYFQGFKEIGKRFSIDVALMPIGAYEPEWFMKISHVSPEEAVQAYLDLHATHFIPMHYGAFALADETPREAITRLRNNWNLRMLPWEQLHVLFLGQTFIYDSETPTKKVNEKIETLHV

SEQ ID NO: 6985 - DNA, 1134 bp, Mannheimia succiniciproducens MBEL55E
  CDS (1)..(1134): transl_table=11
ttgaatatgaacaaaaaaattgtgatgatattgaaaatcttacttgccgttatcgttctgcttaccggtgcggtttgggcgtttatgacctatcaccccgtatggggcggcacgcctgatgagggcagtatggcacgaatccgtgcttccaaagcctataacgcgacactcggcaaatttgaaaatcaagagccgacacaactgctgacgaccgatgaaaaaccgtccattaccacttggattacgcgtctgatggctgccgatgaaggcaaaaatccgagcgagccgcttccaagtgcggcatttgataaaaatgtgctgaaagacggcgaaatggtttggttcgggcattctacggtattgtttaaattgggcgggctgaatgtgattaccgaccctgtttttcacaatgcttcgccgattccttatatcggtatcagcccttttaaaaccgagcattcgtatagcgtggagagcttgcccgaattggatattgtgctgctttcccacgatcattacgaccacttggattatcgcgcgattcaagagttggacagtaaaaccaagcattttattgtgccgttgggggtaaaagcgcatttgcaacgctggggcgtggcggatgacaaaattaccgaaatggattgggacgaacaaaccaaaatcggcacattagccatcacgcttgttcctgcacgtcatttcagcggacgcacgctcaatattaaagacccgacgttgtggggcggctacattattcaatcgcctgaactcaaatattattacagtgcagacagcggttacggcaaacattaccgcgaaaccattgccaaacacgccccctttgattttgtgatgatagaaaatggggcgtacgataaaaaatgggcattgatacacgaaacacccgaagaagccttgcaagccttgaaagatattggtgccacgaaagtgttgccgatacattggggtaagtttgatatggcaaaccacgtttggacggatccgattaaccgattgatgaaagacgtagctagccagcctgaaatttctgttgcaacaccaaaaatcgggcaaatctttcatacccaaggcgacttgcctgccgagcaatggtggcaaggcgtgagatag

SEQ ID NO: 6986 - protein, 377 aa, Mannheimia succiniciproducens MBEL55E
MNMNKKIVMILKILLAVIVLLTGAVWAFMTYHPVWGGTPDEGSMARIRASKAYNATLGKFENQEPTQLLTTDEKPSITTWITRLMAADEGKNPSEPLPSAAFDKNVLKDGEMVWFGHSTVLFKLGGLNVITDPVFHNASPIPYIGISPFKTEHSYSVESLPELDIVLLSHDHYDHLDYRAIQELDSKTKHFIVPLGVKAHLQRWGVADDKITEMDWDEQTKIGTLAITLVPARHFSGRTLNIKDPTLWGGYIIQSPELKYYYSADSGYGKHYRETIAKHAPFDFVMIENGAYDKKWALIHETPEEALQALKDIGATKVLPIHWGKFDMANHVWTDPINRLMKDVASQPEISVATPKIGQIFHTQGDLPAEQWWQGVR

SEQ ID NO: 6987 - DNA, 1056 bp, Mannheimia succiniciproducens MBEL55E
  CDS (1)..(1056): transl_table=11
atgcaaactaagcctttcggcaaacatcccgaagggcaaaggctggcgcgtattgaacaatccgttcattataaagcgggaaaattcgtcaaccatttaccgaccgaagttcaaaccagcgataaaccgctttggaaaatatggtatgactttttattccaacaaatagatcaccttacgccgaaccgcccgcttcccgtggtaaaaaccgatttgcagcaattaagccgggagaaaaactttattgtttggttcggtcattcgtcttatttaattcaattggacggaaagcgctttttagtggatccggtgctggtttccggctcaccgttgtcttttgccaataaaatgtttcaaggtaccaatctgtatcagccgcaagatatgcccgatttcgattatttggttatcactcacgatcactgggatcatctggattatgaagcggttatccaactaaaaaacaaaatgaaggaaaaagtaattacaagcttgggcgtgggcgctcatttggaatattggggttatcctgcagaacgtattattgaaatggactggaatgaaaaaaccgagcttgaaaaccatttcaaaattaccgccttacctgcccgccatttttccggcagaggcgttgttcgcaataaaacgctatggtcttcatttatgttggaagtgcccggcgagactatttatctgggcggggacagcggttatgaccctatttatcaggaaatcgggcaacgttttaacattagtttggccttaatggaaaatggtcaatacaataaagattgggcgaatattcatattcagcccgaacaattgacactagcggtaaaagcgctgcgtccaaaacgattaatgaccgtgcataacgccaaattcgccctcgcccgacacgactggcgcgcacctttagaacagatttaccgaaacgcgcaaaaagaaaacttcaacttattcacgccaaaaatcggtgatgttttctatttttcggaacaaggcgaagcggacagcccaaattttcgggaaccttggtggcaaagcgtagaataa

SEQ ID NO: 6988 - protein, 351 aa, Mannheimia succiniciproducens MBEL55E
MQTKPFGKHPEGQRLARIEQSVHYKAGKFVNHLPTEVQTSDKPLWKIWYDFLFQQIDHLTPNRPLPVVKTDLQQLSREKNFIVWFGHSSYLIQLDGKRFLVDPVLVSGSPLSFANKMFQGTNLYQPQDMPDFDYLVITHDHWDHLDYEAVIQLKNKMKEKVITSLGVGAHLEYWGYPAERIIEMDWNEKTELENHFKITALPARHFSGRGVVRNKTLWSSFMLEVPGETIYLGGDSGYDPIYQEIGQRFNISLALMENGQYNKDWANIHIQPEQLTLAVKALRPKRLMTVHNAKFALARHDWRAPLEQIYRNAQKENFNLFTPKIGDVFYFSEQGEADSPNFREPWWQSVE

SEQ ID NO: 6989 - DNA, 996 bp, Bacteroides fragilis YCH46
  CDS (1)..(996): transl_table=11
atgggcgagcatatatgtttcagaagaaatgaaagactggcaacggtcaatcctcactggcggggcaatcctgtagtaagaggaaagtttgtcaatcgccagcatcgttttcgtcccggaatggggagtgtgttgaagtggcgtctttcgcccaatccgcagcggaaagagaaaaagagtgtgaagtggagtcccaagttgaattatctacgttcgctggatggcgtggtaggcaattcactgatttggctcgggcataattctttcttcctgcagttgggtaggaagcggatcatgttcgaccccgttttcggcgatattcctttcgttaagcggcaaagtgattttccggccaatcccgatatatttaccgatatcgattatctgctgatcagtcacgatcattttgatcacctcgataagcaaagtgtggcacggttggtaaaaaacaatccggggatgaaactcttttgtggcctgggcaccggggagctgatcaaaggatggtttcctgagtttgaggtgacagaggcaggctggtatcagcagatagaagatgacgggctgaaaataacgtttcttcctgcacaacattggagcaaacgttccgttcgcgatggagggcgcaggctgtggggggcatttatggtacaggccgatggtatttccctctactacagtggtgataccggttactccaggcatttccgcgaaatacccgatcttttcggagctcctgattatgctttggtgggtatcggggcctataaaccgcgctggtttatgcaacccaatcatatatcgccttatgatgctctgactgcatcgaccgatatgaaggctgctctcacaattccgatgcattacggaactttcgatttgtccgatgaacctctgcatgaccctcctctggtttttgctgccgaagccaagaagcgaaagatagatgtatatatccccgtactgggagaggtggtgaagttgaagcggatgtag

SEQ ID NO: 6990 - protein, 331 aa, Bacteroides fragilis YCH46
MGEHICFRRNERLATVNPHWRGNPVVRGKFVNRQHRFRPGMGSVLKWRLSPNPQRKEKKSVKWSPKLNYLRSLDGVVGNSLIWLGHNSFFLQLGRKRIMFDPVFGDIPFVKRQSDFPANPDIFTDIDYLLISHDHFDHLDKQSVARLVKNNPGMKLFCGLGTGELIKGWFPEFEVTEAGWYQQIEDDGLKITFLPAQHWSKRSVRDGGRRLWGAFMVQADGISLYYSGDTGYSRHFREIPDLFGAPDYALVGIGAYKPRWFMQPNHISPYDALTASTDMKAALTIPMHYGTFDLSDEPLHDPPLVFAAEAKKRKIDVYIPVLGEVVKLKRM

SEQ ID NO: 6991 - DNA, 1146 bp, Nocardia farcinica IFM 10152
  CDS (1)..(1146): transl_table=11
atgatgcgcgtcggcaaaccgctcctgctggccgccaccgcggcgggtgccgcctgggcggtgcgcgccgcctgggggatcccgtcggcgctcggcgcgtcgatgtcgacgatccggccgtccgcacgcagcctcgccaactatcgcggcggtcgcttccacaacaccgagccgagcgtccagttcgaggcgggttcggttgcggcgctgctcgtctcggcgtggaccaaacgcaaggccgggcatccgcgcggcccgatcccggtggtgcggcccgaaaccccggccgagcccggcgatctcgccgtcacctggtacggccacgccaccacgctcgtcgaggtcgacggttaccgggtgctcaccgatccggtgtggagcgagcgggtgtcgccgtcgaccctggtcggcccggcccggttgcacccggtgccgcagccgctgtccgcgctgcccgagctggacgcggtgctcatctcccacgaccactacgaccacctcgacaaggagaccgtccgggcgctgctcgccgggcagtccgcgccgttcgtggtgccggtcggcatcggtgcgcatctgcggcactggggggtgcccgaggaccggatcgtcgagttgggctggggcgcttcggtgtcgatgcaggcgctcggtcgtgcccgtgacggtggtgacctggtgctcacctgcaccgaggccaggcacttctccggccgcgggctggtgcgcaacaccacgctgtgggcgtcgtggtcgatcgtcggcccgacccggcgggtgtatttcggcggtgacaccggctacaccaaggccttcgccgaggcgggcgcggcgctgggcccgttcgacctcacactgctgcccatcggcgcctacgacgagcactggaccgatgtgcacatgaatcccgaggaggcggtgcgtgcgcacgccgacctgtgtgtcggcgacgccgggcacggcatgctcgtgccgatccactgggccaccttcaatctggccttccacgggtggtcggagccggtgcgccggatggtgtcggcggcgcgggcggcgggtacccgggtggcggtgcccaaaccgggccagcgggtgctgcccgcgggcgcggcggaaccggatccctggtgggagaatgtaggttga

SEQ ID NO: 6992 - protein, 381 aa, Nocardia farcinica IFM 10152
MMRVGKPLLLAATAAGAAWAVRAAWGIPSALGASMSTIRPSARSLANYRGGRFHNTEPSVQFEAGSVAALLVSAWTKRKAGHPRGPIPVVRPETPAEPGDLAVTWYGHATTLVEVDGYRVLTDPVWSERVSPSTLVGPARLHPVPQPLSALPELDAVLISHDHYDHLDKETVRALLAGQSAPFVVPVGIGAHLRHWGVPEDRIVELGWGASVSMQALGRARDGGDLVLTCTEARHFSGRGLVRNTTLWASWSIVGPTRRVYFGGDTGYTKAFAEAGAALGPFDLTLLPIGAYDEHWTDVHMNPEEAVRAHADLCVGDAGHGMLVPIHWATFNLAFHGWSEPVRRMVSAARAAGTRVAVPKPGQRVLPAGAAEPDPWWENVG

SEQ ID NO: 6993 - DNA, 1152 bp, Photobacterium profundum SS9
  CDS (1)..(1152): transl_table=11
ttgaaaacatcgttgattcctttaatgagtgtacttggattggctgcctgtaatgataatcctattacgggggaacatgttctgagtgctgatttacgtcaaacgcgtattgaacaatcagctcaattctttgatggcaaagttatttctcgtattccacaggttgaaaatcaagagggtattgtaaaaacgctatggaaattttttgcccaacgtagccaatataagccttcacaagcattaccgtatcaagatgttgatattacacgattacaaaaacctagtgagcaattacgtgtgacttggctcgggcattcgtcattatttatagaagccgacaaaacacgtattttaattgatcctgtatttgaatatgcagcccctgctttttttgcccgaatgtttcagcgtaatgttgcggcccctgtaagccgtgaagatttaccattacctgatgtgattgtgatttcgcatgatcattatgaccatttagaagaaaatacagcccgattttatgccaacaaagatgtgatgttttttgtgccgctaggggttggacgtcaccttgaaaaatggggtgttccaccaacaaatattaaagaatttgattggtgggaaagtcagaaaataaattcagtaaccattactgcggcaccagccaaccacaattcaggtagagggctgtttgattcaaacaaaacgctatgggcttcttgggcaattcaggctgatactggtagtgtattttttagtggcgatactgcttatggtgagcattttaagcaaataggcgaacgcttaggtccgttcgatttggcttttattgaagttgcagccaacttaaaagaagacagtggttatcctgttgaaggctgggggcatatgcaagcatctcataccatgcaggcacatttagatgttcaagctgataaattgtttcctgtccattggtcaacgtatgaactttttattcatcagtgggatgagcctgtaaatgatttgattgcagaagcggctaaatatgatgttgagttagtgacaccgatggtaggtgcttctattgatctgcctttagcagagaaaacggcgtattggtggcaagatgtttatgacaaaggtgcagcaattccattggtgtttaactcacaataa

SEQ ID NO: 6994 - protein, 383 aa, Photobacterium profundum SS9
MKTSLIPLMSVLGLAACNDNPITGEHVLSADLRQTRIEQSAQFFDGKVISRIPQVENQEGIVKTLWKFFAQRSQYKPSQALPYQDVDITRLQKPSEQLRVTWLGHSSLFIEADKTRILIDPVFEYAAPAFFARMFQRNVAAPVSREDLPLPDVIVISHDHYDHLEENTARFYANKDVMFFVPLGVGRHLEKWGVPPTNIKEFDWWESQKINSVTITAAPANHNSGRGLFDSNKTLWASWAIQADTGSVFFSGDTAYGEHFKQIGERLGPFDLAFIEVAANLKEDSGYPVEGWGHMQASHTMQAHLDVQADKLFPVHWSTYELFIHQWDEPVNDLIAEAAKYDVELVTPMVGASIDLPLAEKTAYWWQDVYDKGAAIPLVFNSQ

SEQ ID NO: 6995 - DNA, 1008 bp, Geobacillus kaustophilus HTA426
  CDS (1)..(1008): transl_table=11
ttggccaagcgctatgaaaacttagacggcgtctcgacgcacaaaacatgggccgatttccgccgttggcagcgggagcggaaacaaaaacaaaaagatttgtcctacgtcgtgccgcatgtttcaccgcctcaatacgagaggcttcaggagccgaatggcaggccgcagctctgttgggtcggccattcgacctttgtcgttcaactcaatggcatcaccatcgtcactgatcccgtctgggcgaattggatgggcgcggccaaacgcttgacggctcccggcgttccgcttgacaagatgccgcccgtggacgttgtgctcatctcccacggccactacgaccatttgcatttcggcagcctccgccgcttaaaaggcgatccgcacgtgttcgtgccggtcggcctcggccgcctgttccgccgccgcggctaccgccatgtcaccgaactgtcatggtgggaaacggccgtcttccgtgatgtgtcgctgacgtttgttccatctcagcattggacgcggcggacgctgtgggacacgaacacgtcgcattggggcggatgggtgatcacatcaaacggcgcgcccaccatctacttcgccggcgacagcggctacttccgcggctttcgcgacatcggcgaacgcttttccatcgactatgcgctcttgccgatcggcgcgtacgaaccggaatggtttatggggccgcagcacaccacgcccgaagaagcggtgcaggcgtttttggactgccgcgcccggctgtttgtcccgatgcattacggggccttccgcctcgcggacgatacgccgaaagaagcgctcgatcgcttatgggccgaatggcggcggcgcggattggaagatgaccgcttgctttgcttaaagctcggcgaggtgatcgatgccgcccaagcgttgacggccctttcccaattcgacaatacgttcagccaaacaggcgcaatcaccatggtgaaacaagcgcggcaaaaggaatga

SEQ ID NO: 6996 - protein, 335 aa, Geobacillus kaustophilus HTA426
MAKRYENLDGVSTHKTWADFRRWQRERKQKQKDLSYVVPHVSPPQYERLQEPNGRPQLCWVGHSTFVVQLNGITIVTDPVWANWMGAAKRLTAPGVPLDKMPPVDVVLISHGHYDHLHFGSLRRLKGDPHVFVPVGLGRLFRRRGYRHVTELSWWETAVFRDVSLTFVPSQHWTRRTLWDTNTSHWGGWVITSNGAPTIYFAGDSGYFRGFRDIGERFSIDYALLPIGAYEPEWFMGPQHTTPEEAVQAFLDCRARLFVPMHYGAFRLADDTPKEALDRLWAEWRRRGLEDDRLLCLKLGEVIDAAQALTALSQFDNTFSQTGAITMVKQARQKE

SEQ ID NO: 6997 - DNA, 1080 bp, Idiomarina loihiensis L2TR
  CDS (1)..(1080): transl_table=11
gtggtgaaaattaacgagctaatgctggttactgcttatgcattgctctccttagttttaactgggtgcagcgcaaacttagtaacgacaacgaacaaaaagactcaactgattaatgaggaaaccgggcgctttcaaaacctggacgccggtgagaagagctatccgttaacctgtaaacaagattgctataagcctcgtagcgatattcagtgtggtagcgatgggttgtgtcagtacactggaaataagaaggctttcctcgggggaacggatttctctgttaaatggctgggtcacgcagcttttgtcattaaaacctcaagcggagagacgtttttaacggatccagtcttcaatgactttgactggccagttaactggctgttttcacttgttggaggtgaacagcgaaaggtgaatgtggagccagatccagagctgattgatgccaccgatgcggtattatactcccatattcattacgatcattttaataagagcgatattgaaaccatagggcgcaagcccggatacttagtgccattgaatctggccgatcactttccatccattggagcaaatataactgaactcggttggttttcttcgaagaaaataggtgactctctggtgactgcggtgcctgctcaccactttagtagccgcaccttggtgccctttatttacgaagataacaataaagactcctggaatgcctggttaatcgaaaacaaggggaagacgttgcttttcgccggagataccggttattcagaacactttaaagtaataaacaagcgttacggtgatattgatgtgtgtctgttgccgatagcgtcttattacagtgaagagtcgcctgaatggtatcgctatgttcacatgacgccggaagacgccctggcggcagccgctgatcttaattgcaaagtatttatcccctggggatacggcaatgcaagctggggtctgggagatctatcctctcactcggcactaactcgctttttaaatatggcagagaaagttgggacatcagctgaaatcgtgattttaaacgaaggggaaagcttgtag

SEQ ID NO: 6998 - protein, 359 aa, Idiomarina loihiensis L2TR
MVKINELMLVTAYALLSLVLTGCSANLVTTTNKKTQLINEETGRFQNLDAGEKSYPLTCKQDCYKPRSDIQCGSDGLCQYTGNKKAFLGGTDFSVKWLGHAAFVIKTSSGETFLTDPVFNDFDWPVNWLFSLVGGEQRKVNVEPDPELIDATDAVLYSHIHYDHFNKSDIETIGRKPGYLVPLNLADHFPSIGANITELGWFSSKKIGDSLVTAVPAHHFSSRTLVPFIYEDNNKDSWNAWLIENKGKTLLFAGDTGYSEHFKVINKRYGDIDVCLLPIASYYSEESPEWYRYVHMTPEDALAAAADLNCKVFIPWGYGNASWGLGDLSSHSALTRFLNMAEKVGTSAEIVILNEGESL

SEQ ID NO: 6999 - DNA, 963 bp, Campylobacter jejuni RM1221
  CDS (1)..(963): transl_table=11
gtgcagggtaaaaaatatgaaatttttcttaatgaaaatgagcacagtcttataactcctaaagtgtcttttaaagaaattttgaggtattattatctttatccaaaaaatgccatcccttcttttaagttaccttttttcaagcctgatttgagtggttttagcactccgcatattacttggcttggacattcttcgctttttataagttttaaagaatataaaattttgatcgatcctgtttttaacactcatgcttcgcctatttcttttattaacaaggcttttaaaaatgctcctgtttataatgtaaatgattttaatgaaatttttgctgtgattatcacgcattcacattttgatcatttagatgttaagagtgtcaaagctttaaaagaaaaagcacgattttttatcacacctttaaaagtgggaaattatctaaaaagctatggggtgagtgagaaaaaaatcatagagcttgattggtggagcggcatagaatttggtgatttaaaaatcattgcaacgcctgcacaacacagttcaagcaggggagatggtaaaaacaaaaccctttgggcttcttttgtgatggaatttttaagtgtagataagagagtgttttttagcgcagatggagggtattttacacattttaaaaaaataggtgagtattttggagattttgacttagcttgtcttgaaagcggacaatttaatatcgcctggccatattcacactcttttcctgagcaaattttaaaagaagcaaaagatcttaatgcaaaagctgtcatgcctatacattgggggagatttttagcaggaactcatgcatggaatgaggtggtaaaatttctttatgaaaatttagatttaccccttatcacaccaaaaatgggcgaggcttatgaagtaggagctaaatttaaacaggatttttggtggaaagaagaataa

SEQ ID NO: 7000 - protein, 320 aa, Campylobacter jejuni RM1221
MQGKKYEIFLNENEHSLITPKVSFKEILRYYYLYPKNAIPSFKLPFFKPDLSGFSTPHITWLGHSSLFISFKEYKILIDPVFNTHASPISFINKAFKNAPVYNVNDFNEIFAVIITHSHFDHLDVKSVKALKEKARFFITPLKVGNYLKSYGVSEKKIIELDWWSGIEFGDLKIIATPAQHSSSRGDGKNKTLWASFVMEFLSVDKRVFFSADGGYFTHFKKIGEYFGDFDLACLESGQFNIAWPYSHSFPEQILKEAKDLNAKAVMPIHWGRFLAGTHAWNEVVKFLYENLDLPLITPKMGEAYEVGAKFKQDFWWKEE

SEQ ID NO: 7001 - DNA, 1005 bp, Gluconobacter oxydans 621H
  CDS (1)..(1005): transl_table=11
gtgcttgatgacaacctgccacatttcgacgggcgtcattaccgaaatccagaggcctggcgcccggacgaaacacgcacggcccgcacgacgtcccagcggatcgggaatattttccgctggcagatggggctgcgtccccgctggccggatgcccttccgccccagaaagcctacccgcaggttacacccgctccgggggaatgctgcgttacatttatcggtcatgcgaccgttctgctccagtttggccgcacaggacgcgcgcctctgcggatcatcactgatccggtgttctccgaacgctgctcccccttccgcagtttcggtcctcgtcgcgtccgtccgcccggcatcaccctcgaagccctgccccgcatcgacatcatccttgtctcgcactgccattacgatcatctggacctgcggagcctgcgtgccctcgccgaacgggacgacccgttgtgcatctcgctgcctggcaaccgccgccatctggaaaaggccgacctcccgcgcattaccgagctggactggtgggaaagcaccaccgatgacggcgctcgcatcacggccaccccggccctgcatggcagcgcccgcacgccgttcgattccaaccgtgcgctctggggcggctttacgatcgaagcggatggccacacggtgtttttcgcgggcgacacggcctgggggaagcatttcgacgcgattcaccgccgctggccgcatatcgacctcgccatcctgcccatcggcgcctacgacccgcgcgatttgatgcggcgcgttcacatgtcgcccgaagaagctctcatggcctttgatacactcagggcaaaacagggactgcctatccattttgggaccttccagttgaccgacgaggccattctggaaccccccacccgtctggaattcgccagccgccccggaagccgccccttcgcagcactggagaacggtgagagcctcacccttccgcccgctgacacaaaaagctaa

SEQ ID NO: 7002 - protein, 334 aa, Gluconobacter oxydans 621H
MLDDNLPHFDGRHYRNPEAWRPDETRTARTTSQRIGNIFRWQMGLRPRWPDALPPQKAYPQVTPAPGECCVTFIGHATVLLQFGRTGRAPLRIITDPVFSERCSPFRSFGPRRVRPPGITLEALPRIDIILVSHCHYDHLDLRSLRALAERDDPLCISLPGNRRHLEKADLPRITELDWWESTTDDGARITATPALHGSARTPFDSNRALWGGFTIEADGHTVFFAGDTAWGKHFDAIHRRWPHIDLAILPIGAYDPRDLMRRVHMSPEEALMAFDTLRAKQGLPIHFGTFQLTDEAILEPPTRLEFASRPGSRPFAALENGESLTLPPADTKS

SEQ ID NO: 7003 - DNA, 1068 bp, Vibrio fischeri ES114
  CDS (1)..(1068): transl_table=11
atgaaaaaagaacgtactttgattatcaataaaaagatcgctttaataggagttaccgtcatggctttcactttttcttatttccaacaaggtgagaaggattcccaagctcgttttaaaaacagcgagatggaatacacgaccagtacaagtaatatttgggatatcgctaaagcatacatttcaaccacaagagttgaggcgacacctaaaaatacagtacctgttcaagccatttctattgatgatttaatgcaagaaaaagaagccgtgctatatcgccttggacattcctctgttttgatcaaacttgacggtcaacttatcttaactgatcctgtttttagtgatcgcgcttcacctgttcaatgggcggggccaaaacgttttcatgctgcgcctatctcaatttctgatctcccaacaattcaagtggttgctattagccatgaccattatgatcatctcgataagcatgcagtaaaacagttaaacgataaagtagagcactttgtcgttcctcttcgtgttgggaaattactcaaaaaatggggtgtagaagaaaataagatcaccgagtttgattggtggcaatctcatacgattagtcatattgaattctcttttgcaccgacccaacatttctcaggtcgtggtttaacagataaaaacagcacgttatggggaagttgggtcatcaaaggcaagcaagcaaaccttttctttagtggcgactctggttatttttctggatttaaagagatcggcgataaatacggtccatttgacttaacgatggttgaaactggcgcatataatgaattatggtcagatattcatatgttcccatcacaaagtgtacaagcacatttagatgttaaaggacaaactatgatgccaattcataatagtacgtttgatttagccctgcacgattggcaagatcctctagaacaggtatctgctattagtgccgaaaaaaaagtacgtttagtcaccccaattattggagagaaaatcatgatcacagacccaaaagtaacatctcattggtggcgtgaaatgtaa

SEQ ID NO: 7004 - protein, 355 aa, Vibrio fischeri ES114
MKKERTLIINKKIALIGVTVMAFTFSYFQQGEKDSQARFKNSEMEYTTSTSNIWDIAKAYISTTRVEATPKNTVPVQAISIDDLMQEKEAVLYRLGHSSVLIKLDGQLILTDPVFSDRASPVQWAGPKRFHAAPISISDLPTIQVVAISHDHYDHLDKHAVKQLNDKVEHFVVPLRVGKLLKKWGVEENKITEFDWWQSHTISHIEFSFAPTQHFSGRGLTDKNSTLWGSWVIKGKQANLFFSGDSGYFSGFKEIGDKYGPFDLTMVETGAYNELWSDIHMFPSQSVQAHLDVKGQTMMPIHNSTFDLALHDWQDPLEQVSAISAEKKVRLVTPIIGEKIMITDPKVTSHWWREM

SEQ ID NO: 7005 - DNA, 1065 bp, Bacteroides fragilis NCTC 9343
  CDS (1)..(1065): transl_table=11
atgaaacagaaaatgattatatgtatatccatttttatagtattggttcttaccgttattatcgttttgaaccatccggctttcggccgtactcctcgtggagaacgactggtacggatcgaacgttctccgaactacaaaaaggggcaattcgtaaatcaggaaccgactccgtttatgaccaccgataaaagccggtggcggatcatgtgggacaacctgacggaaaagaaaccggacaatcttgttccgtccgaaagcatccatgcggtcaagaccgacctgaaacaattggacctgtcgaaagatgccgtcgtatggttcggccactcgtcttacctgctgattaacggcggtaagaaaatattggtcgatccggtgctgacgacggggttcccggcctctcttatgatgaagcctttcaaggggacggacatttactcgccggaagacatcccggaggtggattaccttatcatcacgcacgaccattacgaccacctcgattacgggactgtgaaagcgatacgtgacaaagtggacaaagtcatctgtccgctcggtgtgggggaacatcttgaatactggggatattctgcagagaagattgtcgaaatggactggaatgaagtatatacctccgaacccggctttcggattacgtgtttgcctgcccgccatttttcaggccggttccttcggcagaatccctcgttgtgggcttcattcatgctcgaagggcactctacggtctatattggcggtgatagcggctacggcgctcatttctcggaaatcggcaaacggtttccgcatatcgaccttgccatcctcgaaaacgggcaatacaacgaagactggcggtatatacatacgatgcccgaacagcttccggtagaggttcacgaactggatgcggctaaagtccttccggtgcacaacagcaaattttcactgtcccgtcacgcatgggacgaaccgatccaccgcatcgaacaagcagcaacaaaggacagcagcctgcatgtaatacatggtatcatcggtagtcccataacctattga

SEQ ID NO: 7006 - protein, 354 aa, Bacteroides fragilis NCTC 9343
MKQKMIICISIFIVLVLTVIIVLNHPAFGRTPRGERLVRIERSPNYKKGQFVNQEPTPFMTTDKSRWRIMWDNLTEKKPDNLVPSESIHAVKTDLKQLDLSKDAVVWFGHSSYLLINGGKKILVDPVLTTGFPASLMMKPFKGTDIYSPEDIPEVDYLIITHDHYDHLDYGTVKAIRDKVDKVICPLGVGEHLEYWGYSAEKIVEMDWNEVYTSEPGFRITCLPARHFSGRFLRQNPSLWASFMLEGHSTVYIGGDSGYGAHFSEIGKRFPHIDLAILENGQYNEDWRYIHTMPEQLPVEVHELDAAKVLPVHNSKFSLSRHAWDEPIHRIEQAATKDSSLHVIHGIIGSPITY

SEQ ID NO: 7007 - DNA, 996 bp, Bacteroides fragilis NCTC 9343
  CDS (1)..(996): transl_table=11
atgggcgagcatatatgtttcagaagaaatgaaagactggcaacggtcaatcctcactggcggggcaatcctgtagtaagaggaaagtttgtcaatcgccagcatcgttttcgtcccggaatggggagtgtgttgaagtggcgtctttcgcccaatccgcagcggaaagagaaaaagagtgtgaagtggagtcccaagttgaattatctgcgttcgctggatggcgtggtaggcaattcactgatttggctcgggcataattctttcttcctgcagttaggtaggaagcggatcatgttcgaccccgttttcggcgatattcctttcgttaagcggcaaagtgattttccggccaatcccgatatatttaccgatatcgattatctgctgatcagtcacgatcattttgatcacctcgataagcaaagtgtggcacggttggtaaaaaacaatccggggatgaaactcttttgtggtctgggcaccggggagctgatcaaaggatggtttcctgagcttgaggtgacagaggctggctggtatcagcagatagaagatgacgggctgaaaataacgtttcttcccgcacaacattggagcaaacgttccgttcgcgatggagggcgcaggctgtggggggcatttatggtacaggccgatggtatttccctctactacagcggtgataccggttactccaggcatttccgcgaaatacccgatcttttcggagctcccgattatgctttggtgggtatcggggcctataaaccgcgctggtttatgcaacccaatcatatatcgccttatgatgctctgactgcatcgaccgatatgaaggctgctctcacaattccgatgcattacggaactttcgatttgtccgatgaacctctgcatgaccctcctctggtttttgctgccgaagccaagaagcgaaagatagatgtatatatccccgtactgggagaggtggtgaagttgaagcggatgtag

SEQ ID NO: 7008 - protein, 331 aa, Bacteroides fragilis NCTC 9343
MGEHICFRRNERLATVNPHWRGNPVVRGKFVNRQHRFRPGMGSVLKWRLSPNPQRKEKKSVKWSPKLNYLRSLDGVVGNSLIWLGHNSFFLQLGRKRIMFDPVFGDIPFVKRQSDFPANPDIFTDIDYLLISHDHFDHLDKQSVARLVKNNPGMKLFCGLGTGELIKGWFPELEVTEAGWYQQIEDDGLKITFLPAQHWSKRSVRDGGRRLWGAFMVQADGISLYYSGDTGYSRHFREIPDLFGAPDYALVGIGAYKPRWFMQPNHISPYDALTASTDMKAALTIPMHYGTFDLSDEPLHDPPLVFAAEAKKRKIDVYIPVLGEVVKLKRM

SEQ ID NO: 7009 - DNA, 1092 bp, Pseudomonas syringae pv. syringae B728a
  CDS (1)..(1092): transl_table=11
atggcctcgacacatcagaaaaagtacgcttcttcactgcctgtcttgtcccgccacgcagggcgataccgcaatcatgcggccatgaagccgtcgagtctgctgcgcacgctcgggattttctgggatcaggtgttcaacaagcccaaggacacacgcccggcaggcgacattccggtacagccgctgtcgcgtcaacagttgctggcagcgccgaacaacactgtttaccgcctggggcattcgaccgttctgctcaaactgcgcgaccagttctggctgaccgaccccgtgtttgccgagcgtgcctcgcccgtgcagtgggctggcccgcagcgctttcatcagccgccgatcagcctcgaagagttgccgccgatcaaggcggtgattctttcgcacaaccattacgatcacctcgatcgcatggccatcaaggcgctgaccgaaaagaccgagcactttctggcgccgcttggcgtgggcgatacgttgatcgagtggggcgtgcctgcgcacaaggtgcgtcagctggactggtggcagtcgaccgaggtggcgggcatcgagttcgtcgccacgccctcgcagcatttctcggggcgtacgctgctcgacagcaaccgcaccttgtgggcgtcctgggtgatgatcgatggcgatcaacggatcttcttcagtggcgacagcggttacttcgatggtttcaaaaccattggcgagcaatacggaccatttgacctgaccctgatggaaaccggcgcctacaacgtcgagtggcccgatgtgcacatgcagcccgagcagacgctgcaggcgcacctggacctgcgcggtcgctggttgctgccgatccacaacggcaccttcgacctgtcgatgcatgcctggcacgaaccgttcgatcgcattctggccctggcctgggagcagaatgtctcgatcgccacgccgatgatgggccagccgttctatgtgcaatacccgtgtcgcggtctgacctggtggctgggcgtggatgaggtggttgagcctgaaaccgcacagaccgagggtgcagaatcctgcggctgccgtcggcagaatgcctga

SEQ ID NO: 7010 - protein, 363 aa, Pseudomonas syringae pv. syringae B728a
MASTHQKKYASSLPVLSRHAGRYRNHAAMKPSSLLRTLGIFWDQVFNKPKDTRPAGDIPVQPLSRQQLLAAPNNTVYRLGHSTVLLKLRDQFWLTDPVFAERASPVQWAGPQRFHQPPISLEELPPIKAVILSHNHYDHLDRMAIKALTEKTEHFLAPLGVGDTLIEWGVPAHKVRQLDWWQSTEVAGIEFVATPSQHFSGRTLLDSNRTLWASWVMIDGDQRIFFSGDSGYFDGFKTIGEQYGPFDLTLMETGAYNVEWPDVHMQPEQTLQAHLDLRGRWLLPIHNGTFDLSMHAWHEPFDRILALAWEQNVSIATPMMGQPFYVQYPCRGLTWWLGVDEVVEPETAQTEGAESCGCRRQNA

SEQ ID NO: 7011 - DNA, 1053 bp, Xanthomonas campestris pv. campestris str. 8004
  CDS (1)..(1053): transl_table=11
gtgccccccccttcttccgcttatgccgcttcgccgcagttccgcaatggccggtttcgcaacgcccagcccacgctgaccacctcgctgcgcctgggcgagcagctgcggttgctgtggacgttcttcttcgacaagccacgcgacaccgtaccgtccacaccaccgccggtgttgccgctgactcgcgcgcagctgctcgccgcgccggaccgcagcctgtaccggcttggccactccaccgtgttgctgaagctggccggcggtttctggctcaccgacccggtgttcgccaagcgcgcctcgccgttttccttcgccggccccaaacgcttccatgccccgccgattgcactggccgacctgccgccgctggccggggtgatcctgtcgcacaaccactacgaccacctggaccgcgccaccatccgcgcactggccgaccgcgttggcgttttcgtcgcgccgctgggcgtgggcgatttactggtacgttggggcgtggacccggccaaggtgcggcagctggactggtgggactcgctcaacgtggacggtgtgcagctcaccgccacgccatcgcagcacttttccgggcgcgggttgttcgatagcggccgctcgctgtggtgctcgtgggtgatccagcacgaggagctgcgggtgttcttcagcggcgacggtggctacgcgccgcacttcaagaccatcggtgagcagctcggcccgttcgatgtggcgctgatcgaaaacggcgcctacgaccagcaatggccgcatgtgcacatgcaaccggagcagagcctgcaggcatatctggacgtgggcgggcagacgctgctgccgatccacaacggcaccttcgatctggccatgcacgcctggcaggagccgctggaccggatcgtggcgttggccgatagcgccggcgttgcgctggtcacgccgtgcatgggcgagcgggtggatctgcaggcgccggccaatcgcgtgcgttggtggcggcaggatgcggcggcagcggcgtcggatggaatggtggtgacgcggtaa

SEQ ID NO: 7012 - protein, 350 aa, Xanthomonas campestris pv. campestris str. 8004
MPPPSSAYAASPQFRNGRFRNAQPTLTTSLRLGEQLRLLWTFFFDKPRDTVPSTPPPVLPLTRAQLLAAPDRSLYRLGHSTVLLKLAGGFWLTDPVFAKRASPFSFAGPKRFHAPPIALADLPPLAGVILSHNHYDHLDRATIRALADRVGVFVAPLGVGDLLVRWGVDPAKVRQLDWWDSLNVDGVQLTATPSQHFSGRGLFDSGRSLWCSWVIQHEELRVFFSGDGGYAPHFKTIGEQLGPFDVALIENGAYDQQWPHVHMQPEQSLQAYLDVGGQTLLPIHNGTFDLAMHAWQEPLDRIVALADSAGVALVTPCMGERVDLQAPANRVRWWRQDAAAAASDGMVVTR

SEQ ID NO: 7013 - DNA, 513 bp, Rickettsia felis URRWXCal2
  CDS (1)..(513): transl_table=11
atgaatgacgtaataatcaaaaaacatattcctaatgcagaaattattaccttaggatggggagaatcatataaagaacaaaatatttatctagaaccggcacagcattggtcggctagaggaatatttgataaaaataaagcattatggggaacttttatcattaaaactaatataggagatatttgttttataggtgattcgggttataacgatacactttttaaagagatcggaaaaaaacataatattttaataagccttattccgataggagcttatgaaccaagatggtttatgaaaccggtacatatgaatcctgaagaagccgtatttactcatttggacttaaattctaaatattctatagctagtcattttgatgtctttcaattagctgatgaagcctttgatgcggctcctttggaactccgacaagctatgaaaaaacataatattgatgaaaataagtttattatccctgaaataggtaaatttttcctatttgattaa

SEQ ID NO: 7014 - protein, 170 aa, Rickettsia felis URRWXCal2
MNDVIIKKHIPNAEIITLGWGESYKEQNIYLEPAQHWSARGIFDKNKALWGTFIIKTNIGDICFIGDSGYNDTLFKEIGKKHNILISLIPIGAYEPRWFMKPVHMNPEEAVFTHLDLNSKYSIASHFDVFQLADEAFDAAPLELRQAMKKHNIDENKFIIPEIGKFFLFD

SEQ ID NO: 7015 - DNA, 1059 bp, Pseudomonas fluorescens Pf-5
  CDS (1)..(1059): transl_table=11
atggccactgtctcgtcaagcatcacccgtgctccccgcgaggaaacctcgcgccaggagcagggggcttttcgcaaccatgcgccggtgcgtcgtgccggctttggcaagaccctgcagatcttctggaacatgttgttccacaagccgcgcaatacccgcccggccggagccattccggtgcagccgctgacccgcgagcagttgctggcggcgcccgatcacagcgtctaccgcctggggcattccaccgtgctgctgaaaatgcgcggcaagttctggatcaccgatccggtgtttgccgagcgcgcgtcacccgtgcaatgggccgggccgaagcgctttcaccagccgccgatcagcctggagcaattgcccgatatcgaggcggtgatcctgtctcatgatcattacgatcaccttgatcacaagaccgtgctggtcctggcggacaagactcggcatttcctcaccccgctgggggtgggcgataccctgatcaagtggggcgtgtcggcggccaaggtccggcaactggactggtggcagggctgtgaggtcgctggcgtccgtttcgttgccaccccatcgcagcacttttccgggcgtggtctgttcgatggcaaccggaccttgtgggcctcctgggtgatgatcgatggccccacgcggatcttcttcagcggcgataccggttatttcgacggtttcaagcgtatcggccagcagtacggcccattcgacctgacactgatggaaaccggggcctacaacgtcgaatggccccatgtgcacatgcagcccgagcagactctgcaggcccacatcgacctgcaaggtcgttggctgctaccgatccacaacggcaccttcgacctggcgatgcacgcctggcacgaacccttcgaccgcatcctggccctggcctgggagcgcagtaccaacatcaccacgccgcaaatgggcgaagccttcaacctggcgcagccgcagcggggagccgcctggtggctggaggtggaaggtgcactggagcaggcgggcgtcgaatccgcctga

SEQ ID NO: 7016 - protein, 352 aa, Pseudomonas fluorescens Pf-5
MATVSSSITRAPREETSRQEQGAFRNHAPVRRAGFGKTLQIFWNMLFHKPRNTRPAGAIPVQPLTREQLLAAPDHSVYRLGHSTVLLKMRGKFWITDPVFAERASPVQWAGPKRFHQPPISLEQLPDIEAVILSHDHYDHLDHKTVLVLADKTRHFLTPLGVGDTLIKWGVSAAKVRQLDWWQGCEVAGVRFVATPSQHFSGRGLFDGNRTLWASWVMIDGPTRIFFSGDTGYFDGFKRIGQQYGPFDLTLMETGAYNVEWPHVHMQPEQTLQAHIDLQGRWLLPIHNGTFDLAMHAWHEPFDRILALAWERSTNITTPQMGEAFNLAQPQRGAAWWLEVEGALEQAGVESA

SEQ ID NO: 7017 - DNA, 1053 bp, Candidatus Pelagibacter ubique HTCC1062
  CDS (1)..(1053): transl_table=11
gtggcaaaatttataatttttatatttataattattgcatataactcatcactaattgctatggaaaaaaaaccttatcatcatttaccagatggaacttttagaaatccagaaggatcacctgttagaactagtcaagcgaagttttcttacacacaattcattaaattgaaaaagaaaatagacatgacggttcctaaagaacacgttgttgataaagaaaaagttttaactgatttagaaaagtataaaaatgaagattatattgcttggattggtcatgctacttacttaattaaacttggagatacaacaattataactgacccagtgttttcaaaaaatgcgggacctttaatttttggcccagacagatttactgagcctgctttaaatttaaatgaaattccaaagactgatttattattattaacacataatcattatgatcatcaagatatggggaccattagaaaatatccgtttaagaatacaaaagttttggccccactaaatcttggaaaatactttacaaaaaataaatttaaagatgtaaatgaaatggattggtatgaggaaattcaggttaatgatgatctgaaagtaacattactcccagctgtccattggtcgaagagaagccttacagatatgaacaaaacactctggggcaatttcttaattgaatataagggtaaaaaaatcttatttgcttgcgatactggctatggaaatatttacaaagaattaggtgaaaaatatggtccaattgatttaacaatgattaatattggagcttatgactttaagcctatgtttgataaatcgatttatcacacaacaccagaagaagctttaaatgtagcaaaagatttaagaagtaaaaaggttatgggaacacactggggaacttttgttttatcactagaacctattatggaaccaccagtaagatttaaagctagtgctgaggagtatggttttaaaaaagatgatgctataatctttaaaattggagagataaattcattaaaaaatatattaactaattaa

SEQ ID NO: 7018 - protein, 350 aa, Candidatus Pelagibacter ubique HTCC1062
MAKFIIFIFIIIAYNSSLIAMEKKPYHHLPDGTFRNPEGSPVRTSQAKFSYTQFIKLKKKIDMTVPKEHVVDKEKVLTDLEKYKNEDYIAWIGHATYLIKLGDTTIITDPVFSKNAGPLIFGPDRFTEPALNLNEIPKTDLLLLTHNHYDHQDMGTIRKYPFKNTKVLAPLNLGKYFTKNKFKDVNEMDWYEEIQVNDDLKVTLLPAVHWSKRSLTDMNKTLWGNFLIEYKGKKILFACDTGYGNIYKELGEKYGPIDLTMINIGAYDFKPMFDKSIYHTTPEEALNVAKDLRSKKVMGTHWGTFVLSLEPIMEPPVRFKASAEEYGFKKDDAIIFKIGEINSLKNILTN

SEQ ID NO: 7019 - DNA, 1008 bp, Colwellia psychrerythraea 34H
  CDS (1)..(1008): transl_table=11
atgaaaaaactctcagcgttaatatttaccgttttactatcctcctgtgtatctcaaccttatacaaagactaatgccccttttgacggtgttaaatttgataacattgagccttttgacgataaaagtatatttgacctactcagttggaaaattaaggctataagtgagtctactccttggccagatgaaattgactccaagcagtttaaaccctctagccaaagatcggtaaagccattaattactgtaatcagccatgcatcagttcttattcagattgataatttaaacatactaacagatcctcattattcactcagagcttcacctgttcaatttgctggacccaaaagagtcgttaaacctggtattgcctttgatgatctgccttcaatagatatcgttcttatatctcataatcattatgaccatctagatcttgatacgctcaagcgattaaacgatagagatgctcccaaattcgttgcaggattgaaaacaaagtcatttctggaagaaaatggaattgaagccgctgtcgatctggattggtggcaaaatataacagctaataatactaagattacttttgttccttcccagcattggtcagccagaggtctattcgataaaagggaaatgctttggggtgggttctatattgaaaataattataagatctactttgcaggagacactggatacgggaaattctttaaaaaaattaaagagaaacttggtgcaccggatctttctttgattccaattggagcgtatgaacctagatggttcatgaaagatgcccaccttaacccaaaggagtctctacaagcatttagagacctagaaagtaagaagatgatcggtattcactttgggacttttaagttaactgatgagggatataatgatccaattgagactcttaatgaagaaattaagaaattaaacatggatcctctaaaagtaattattcctacttttggaaagcctcattcaatttag

SEQ ID NO: 7020 - protein, 335 aa, Colwellia psychrerythraea 34H
MKKLSALIFTVLLSSCVSQPYTKTNAPFDGVKFDNIEPFDDKSIFDLLSWKIKAISESTPWPDEIDSKQFKPSSQRSVKPLITVISHASVLIQIDNLNILTDPHYSLRASPVQFAGPKRVVKPGIAFDDLPSIDIVLISHNHYDHLDLDTLKRLNDRDAPKFVAGLKTKSFLEENGIEAAVDLDWWQNITANNTKITFVPSQHWSARGLFDKREMLWGGFYIENNYKIYFAGDTGYGKFFKKIKEKLGAPDLSLIPIGAYEPRWFMKDAHLNPKESLQAFRDLESKKMIGIHFGTFKLTDEGYNDPIETLNEEIKKLNMDPLKVIIPTFGKPHSI

SEQ ID NO: 7021 - DNA, 1104 bp, Pseudomonas syringae pv. phaseolicola 1448A
  CDS (1)..(1104): transl_table=11
atggcctcgacacatcagaaaaaggatgcttcttcactgcctgtcctgtcccgtcatgaggggcgatatcggaatcacgcgacgatgaaaccggcgagtctgctgcgaacgctccgcattttctgggatcaggcattcaataagcccaaggacacgcgccccgcaggcgaaattccggtgcagccgctgtcgcgtcagcagttgctggcagcgcccaacaacacggtgtatcgcctcgggcattcgacggtcctgctcaaattacgcgaccagttctggctgactgatcccgtgtttgccgagcgcgcgtcgccggtgcagtgggcggggccgcagcgctttcatcagccgccgatcagcctcgaagatttgccaccgatcaaggcagtgattctttcgcacaaccactacgaccatctggatcgtatggcgatcaaggcgctgaccgacaagaccgagcattttctggcaccacttggtgtaggcgatacgctgattgaatggggcgtacccgcgcacaaggtccgccaactggactggtggcagtccaccgaagtggcgggcatcgagttcgtcgctacgccttcgcagcatttttccgggcgtacgctgctcgacagcaaccgtaccctgtgggcgtcctgggtgataatcgacggcgatcagcggatctttttcagtggcgacagcggctatttcgatggcttcaagaccatcggcgagcaatacggaccgtttgacctgacactgatggaaaccggggcctataacgtcgaatggccgcatgtgcacatgcaacccgagcagacgctgcaggcgcatctggacctgcgtggtcgctggttgctgccgattcacaacggcaccttcgacctgtcgatgcacgcctggcacgaaccgttcgatcgcatcctggcgctggcctgggagcagaatgtttcgatcaccacgccggtgatgggccagccgttctatgtgcaatacccgtgtcgcggtttgacatggtggctgggcgtcgatgaagttgccgagcctgaacccgagcccgagcccgagcagcacggccgagtaacgaactgcaaatgtcctcggcagaatgcctga

SEQ ID NO: 7022 - protein, 367 aa, Pseudomonas syringae pv. phaseolicola 1448A
MASTHQKKDASSLPVLSRHEGRYRNHATMKPASLLRTLRIFWDQAFNKPKDTRPAGEIPVQPLSRQQLLAAPNNTVYRLGHSTVLLKLRDQFWLTDPVFAERASPVQWAGPQRFHQPPISLEDLPPIKAVILSHNHYDHLDRMAIKALTDKTEHFLAPLGVGDTLIEWGVPAHKVRQLDWWQSTEVAGIEFVATPSQHFSGRTLLDSNRTLWASWVIIDGDQRIFFSGDSGYFDGFKTIGEQYGPFDLTLMETGAYNVEWPHVHMQPEQTLQAHLDLRGRWLLPIHNGTFDLSMHAWHEPFDRILALAWEQNVSITTPVMGQPFYVQYPCRGLTWWLGVDEVAEPEPEPEPEQHGRVTNCKCPRQNA

SEQ ID NO: 7023 - DNA, 1128 bp, Methanosarcina barkeri str. fusaro
  CDS (1)..(1128): transl_table=11
atgaaaaggcttaaaaaaatgatattatatttactcagttttttgcttctattgggcgttgttgttatattgtttataaacataaacccagctttcggtggggatccaacgaaagaacaaaaagaagtgtatcaacattttaataattatgttgatgggaaatttattaatgaggaccctgcagagttggttacaaattcctcagacgcttcatcaacgaacgaagattctgcttcagactctaaagaccgcaatccgaatggtccaattcctgtttctgctattgactgggacaaaattaaaagtgaaaatgatagtttgacttggtttggacattctgcttttctgcttagcattgataataaaaagttattgatagaccctatgctgagtcctattgcctcaccggtttcatttgtgggaattaaaagatatgaatacagtgaagatattatgctgcatcttattgatgaaatgccgtttgttgatgcagtttttatcacacatgaccattatgaccacttagattaccaatctattgttaaactaaatagcaaagtatcgcatttctttgttcctcttggggttagtgctcatctggttcgatggggtattccaaaagaaaaaattacggaactcaattggttggaagaaacggagtataagggcttaaccgttgccttgacaccagccagacatttctctggaagagatccatttaatatcgatactactctatggggtggatgggtcatcctgggaaataaaactcgaatatataccagtggagacggcggatacggtccacatttcaaggagatcggaaataaatacggaccttttgatataaccttaattgaaggtgcccaatatgatccgagctggtcggatattcatatggtaccggaacaatctgtccaggccaatttggatgtaaatggtaagactatgatgttgatacattggggagcatttacattagctaatcatggttggaatgaaccaatagaaagagcattaaaagaggcaaaaataagaagagtaaatataattgccccgaaaattggtgaaactgttctattggattcagacctgcacatgcctccaactccatggtgggacttttga

SEQ ID NO: 7024 - protein, 375 aa, Methanosarcina barkeri str. fusaro
MKRLKKMILYLLSFLLLLGVVVILFININPAFGGDPTKEQKEVYQHFNNYVDGKFINEDPAELVTNSSDASSTNEDSASDSKDRNPNGPIPVSAIDWDKIKSENDSLTWFGHSAFLLSIDNKKLLIDPMLSPIASPVSFVGIKRYEYSEDIMLHLIDEMPFVDAVFITHDHYDHLDYQSIVKLNSKVSHFFVPLGVSAHLVRWGIPKEKITELNWLEETEYKGLTVALTPARHFSGRDPFNIDTTLWGGWVILGNKTRIYTSGDGGYGPHFKEIGNKYGPFDITLIEGAQYDPSWSDIHMVPEQSVQANLDVNGKTMMLIHWGAFTLANHGWNEPIERALKEAKIRRVNIIAPKIGETVLLDSDLHMPPTPWWDF

SEQ ID NO: 7025 - DNA, 1077 bp, Shewanella amazonensis SB2B
  CDS (1)..(1077): transl_table=11
atgtcccagcaaaccggtgaagcctcgaaaatcaaaggccgctttcgtaatagccacaaggtctatggcgcaggtcttggggatttggtgggcatcatcaaggcgtatctgggcgccaaacgcagtgctcccagcccgaaaagcgccgtgccattgcagcccatcacccccgctgagcttgcccggcctcaggcgcggttatatcgactgggccattccactgtgctgatgtatctggatggcaaatggctgctgaccgatcctgtattcagtgagcgagcctcaccgtttcagtgggccggccccaagcggttccaccaaagtcccatcgccattgaggcgctgccggacatcgatgggctgattttgagccacgatcattacgaccatctggacaccgccgccattaaggcactcgcagcgcgggtaaaacacttttatatgcctttgggcgtgggtaaacgccttatccgcctcggcattgataaggccaggataactgaactggattggtggcagtcggtacaacttggaaccatagagctgaccgcgaccccggcgcagcatttctctggccgtgggctgtttgacagagacgccaccctgtgggccggttgggccatccacggtgagcaggcgcgggtatttttcagcggtgactcgggctattttccgggttttgccgaaatcggtgagcgactaggccccttcgatgtgaccctgatggaaaccggcgcctacaacgagctgtggcgagatattcacatgatgcccgaggagagtttgcaggcacatctggatgttaaagggcagctgatggtgcccattcataacggcacctttgatttggcgctgcacgactggtttgaaccccttgagcgcattcgcgcgctggcgtgggaccggtcggtgaagattgccaccccgatttttggtgaagccctgagtttaaccctgccaggaagcggcagtgattggtgggcacaggagtcggctatttcgacaggtgtggatgcccgtgagaagggaagagccccggctgctgaaagctcgatggtcggtattgctgaaagctaa

SEQ ID NO: 7026 - protein, 358 aa, Shewanella amazonensis SB2B
MSQQTGEASKIKGRFRNSHKVYGAGLGDLVGIIKAYLGAKRSAPSPKSAVPLQPITPAELARPQARLYRLGHSTVLMYLDGKWLLTDPVFSERASPFQWAGPKRFHQSPIAIEALPDIDGLILSHDHYDHLDTAAIKALAARVKHFYMPLGVGKRLIRLGIDKARITELDWWQSVQLGTIELTATPAQHFSGRGLFDRDATLWAGWAIHGEQARVFFSGDSGYFPGFAEIGERLGPFDVTLMETGAYNELWRDIHMMPEESLQAHLDVKGQLMVPIHNGTFDLALHDWFEPLERIRALAWDRSVKIATPIFGEALSLTLPGSGSDWWAQESAISTGVDAREKGRAPAAESSMVGIAES

SEQ ID NO: 7027 - DNA, 1206 bp, Leishmania major
  CDS (1)..(1206)
atggcggagtccatgcagtcgaagccaagctttgaatacccgaagcgcgcggcgatcggctcgtactggtcgaaccgcaacagggacgagaagcacttcaagaacctcggtcctgcatcgttgtccagcgcgtcggccggaaaagtgatgcagtggatgctgtcccacacctgcaacggcgtcccaaagccgaaaggaggctatgacgcgttcggcaagatctggtacgcgccgtgcaacatggccgagtcagtggcgcagtggcgggcgagtatgagtaacgacgaagctcagccagccaagaaccgggtgtactggatcggtcactcaagtcagctgctgtgcctctccaatggcatcaacatcctcttcgaccccatcttctcgcagcgtgcctcgccactgtcgtttgccgggccgtcgcgccggttcccgccagccgccacggcagcgcagctcccaccgatccacattgtcacggtctcgcacaaccactatgaccacatggacaagcaaagcatcaaggccgttgcggcccgcttcccagatgcccacttcgtggtgccgctgaagctggaccgcttcctccgagagtggggtgtgccgggcgcgtctatcaccacgcttgactggtacgaggcgtgcgaggtgaaaggggtccgggtgggttgcacgccggctcagcactggggaaagcacagcgccttcgacgataatgaagtgctatggtgcggctggtgtgtcggctggcagccaggccagcagcagcagcccgcgtctacgtgcgagaagcccaccctcatctccttcagcggcatcgagcctagctccgaggcgctggtcgaggcacagcggacatggaaccggtacaagaagtacttcttcgctggcgacacggcgtacaacccggatgtctcgacgagcatctacgctcacttcggcccgatggatatggctgcgctcccgatcggcgcgtattcaccgcggtggttcatggcgagagcccacatcgacccagagcacgcggtgcagatctttaaggaccagcacatccagcaggccgtggcggtgcactggggtacctttgagctcgccgacgagccgctcgatgagccaccgcaggtcctgcgcaagaccttaaaggacgccagcatcgacgagaacaggttccaaattattcccatgggcaagttcatcgagttctag

SEQ ID NO: 7028 - protein, 401 aa, Leishmania major
MAESMQSKPSFEYPKRAAIGSYWSNRNRDEKHFKNLGPASLSSASAGKVMQWMLSHTCNGVPKPKGGYDAFGKIWYAPCNMAESVAQWRASMSNDEAQPAKNRVYWIGHSSQLLCLSNGINILFDPIFSQRASPLSFAGPSRRFPPAATAAQLPPIHIVTVSHNHYDHMDKQSIKAVAARFPDAHFVVPLKLDRFLREWGVPGASITTLDWYEACEVKGVRVGCTPAQHWGKHSAFDDNEVLWCGWCVGWQPGQQQQPASTCEKPTLISFSGIEPSSEALVEAQRTWNRYKKYFFAGDTAYNPDVSTSIYAHFGPMDMAALPIGAYSPRWFMARAHIDPEHAVQIFKDQHIQQAVAVHWGTFELADEPLDEPPQVLRKTLKDASIDENRFQIIPMGKFIEF

SEQ ID NO: 7029 - DNA, 1014 bp, Theileria annulata
  CDS (1)..(1014)
atgtttagaactagggccagattctacaaaaatcttaacaaatcagactacacattaaattataacttgttcaattctttaaatagacttttcacctatactgtacgcaaatatcccgtcctcaacagagtttttttaaaaaatatcggaaaatggccgaaatataagtataaaaggcccgatgaattcagaatctccgaggccccggatgattgcgttgagttaacgtatttaggccatcgaacaatgtttatacaaatggaaggagttagattcttaactgatccagttttatcaaaaagactcttttcagccggcctaggagtcaaaagaactagcggaaactggtatagatattggcattttcctgccgctgacttcttgttaatatcaaacaattcgtacgattgtatggatacgtggactcttaggaaaataagtgatcagggaggagcactggctataggaggcatgaacataaccaaatacatgaacatgttttatgaaagatttacatatcctctgaggtggttcgaggaagtcgacttcggatgcgtcaaaataacatttctgccggcaaaatcggaaactaaaaggaagtatttgagctgtggaattgataggaatagggtcctttggggaggatttctcataagatctgaccattcaactatattctatgcagggaaaacagacttttcagaccatttcgaaaaaattaaggagtacctgacggatctgaaatgtaaaatagatatcgcaattttaccaatagggcctgaatttaagcataaaatcaacatgagccctgaagaagcagtaaatgtacatttaacacttaagcccaagcatacaatagtagtggctcacgatacgtttccactgggaattgaggcttttggggaactcaaatcgagacttactaaacacatcgaaagtataaataaggaaatcctaaatgaatttttaattttacaagaaaaagaatctttcagattctcaccactaatgtga

SEQ ID NO: 7030 - protein, 337 aa, Theileria annulata
MFRTRARFYKNLNKSDYTLNYNLFNSLNRLFTYTVRKYPVLNRVFLKNIGKWPKYKYKRPDEFRISEAPDDCVELTYLGHRTMFIQMEGVRFLTDPVLSKRLFSAGLGVKRTSGNWYRYWHFPAADFLLISNNSYDCMDTWTLRKISDQGGALAIGGMNITKYMNMFYERFTYPLRWFEEVDFGCVKITFLPAKSETKRKYLSCGIDRNRVLWGGFLIRSDHSTIFYAGKTDFSDHFEKIKEYLTDLKCKIDIAILPIGPEFKHKINMSPEEAVNVHLTLKPKHTIVVAHDTFPLGIEAFGELKSRLTKHIESINKEILNEFLILQEKESFRFSPLM

SEQ ID NO: 7031 - DNA, 1548 bp, Cryptococcus neoformans var
  CDS (1)..(1548)
atgctcgcacccaccgtggccaagatacctcccaccccagacctgccaagggatcaccacggcccacccgcgaaaccgcttgccagtctccaggaaacagccgcacccaagtactttcgcaacccatggccgtcatacagaacagcctccatgtgggacgcctatcaagcctaccagcgtggagcatcaattgctcctcatccatccttcttccagggaaaccgtttttttgatggggaagagccttatagagatcaggaagaagatgattatgaaagtgaaccaatctggacagaatctgattccatcaaaaagaggaaaatctatatccggccagaattttcagacatcagaccgggagatgagaaagacgactggagagacccacctgtggggctggtagagccagattggggcggcaattcgaagacgggagaaagagtcacttggctggggcatgccggtgtgttggtgcagataccgtggaggatcatggatcaggagcaaaccagtagaggtggggctacgtgcggaatattattcgatcctatattttcatatagatgctcgcccacgcagtacattggccctgcaagatacatggatcccccctgttccgtttctatgctaccagaaatacatatctgctgcatctcccacgaccattatgaccatctggactacaacactataatggacttgtggaagtatcatcaggccactatccacttctttgtgcctatagggctcaaaccatggtttactgcttctggtataccatatcatagagtgacagagttggattggtggcgcgaagccattgtatcgtttgaggcttctccggatgtggactatgatccccattatcctcctgatgattatgagaacaagaggagtatagccgaagacctcaccaagacagatacatcagcactcactttgaaggtcgcattcacacctgctcaacatcgttctggtagaagtgtacttgaccacatgacgacgctgtggggaagctggtgtgtaggtgttgttgaagcggccgatgctggtaaagttttgaaaaggggaatgaatgattggaaagggttcaagatttattttggaggagacactgggtatcgttatgcaagtgctcccgaaggcgattctgacgccatttgtcctgcctttcagcaaattgccgattactacgcaccattcaatctggctctccttcctctttcaacgggatcgtcacttcctttcctccggaccgttttatcactgtctttggatcagtatattctcacttcatccctccactgctcgccagcagattcacttgacatacacctcatcattaaaagcgagagaacacttgggatacattggggaacgttctgtgacgcagacgaggcgagaggaacaagagtagactttggaagatgccgcagatcgtacggcgtgagcccagagtgggataccattgaggccgagaaaggaagatttgtcataactgacataggtcagacgcttattttcccgaccaccaaagatgacaattag

SEQ ID NO: 7032 - protein, 515 aa, Cryptococcus neoformans var
MLAPTVAKIPPTPDLPRDHHGPPAKPLASLQETAAPKYFRNPWPSYRTASMWDAYQAYQRGASIAPHPSFFQGNRFFDGEEPYRDQEEDDYESEPIWTESDSIKKRKIYIRPEFSDIRPGDEKDDWRDPPVGLVEPDWGGNSKTGERVTWLGHAGVLVQIPWRIMDQEQTSRGGATCGILFDPIFSYRCSPTQYIGPARYMDPPCSVSMLPEIHICCISHDHYDHLDYNTIMDLWKYHQATIHFFVPIGLKPWFTASGIPYHRVTELDWWREAIVSFEASPDVDYDPHYPPDDYENKRSIAEDLTKTDTSALTLKVAFTPAQHRSGRSVLDHMTTLWGSWCVGVVEAADAGKVLKRGMNDWKGFKIYFGGDTGYRYASAPEGDSDAICPAFQQIADYYAPFNLALLPLSTGSSLPFLRTVLSLSLDQYILTSSLHCSPADSLDIHLIIKSERTLGIHWGTFCDADEARGTRVDFGRCRRSYGVSPEWDTIEAEKGRFVITDIGQTLIFPTTKDDN

SEQ ID NO: 7033 - DNA, 1179 bp, Homo sapiens
  CDS (1)..(1179)
atggatgaaaatgaaagcaaccagtctctgatgacaagcagccaatatcctaaagaagcagtaagaaaacgtcaaaattcagcacggaattccggagcaagtgattcttctaggttttctaggaaaagcttcaaactggattatagactagaagaagatgtaactaaatccaagaaaggaaaagatgggagatttgtgaatccgtggccaacatggaaaaacccctctattccaaatgttctcagatggctgataatggagaaagatcacagcagtgttccaagttctaaagaggaactagacaaagaactcccagtgcttaagccatattttatcactaaccctgaagaagctggagtgagggaagctggcttaagagtcacatggctgggacatgccacggtaatggtggaaatggatgagctcatatttctcacggatcccatctttagctctcgtgcttcaccatcgcagtacatgggtccaaagcgatttcgtcgttccccgtgcacaataagtgaactccctccaatagatgcggtccttatcagtcacaaccactatgaccatctggactacaattctgtcattgctttgaatgagcgatttggtaatgagttgagatggtttgtgcctttgggtctccttgactggatgcaaaaatgtggctgtgagaatgtgattgagttggactggtgggaggagaattgtgtccccggacatgataaggtcacttttgtctttacaccttcccagcactggtgtaaaaggactctaatggatgacaacaaggtgctatggggcagctggtctgtcttggggccttggaatcgattttttgcaggagatactggttattgccctgcttttgaagagataggaaaaagatttggaccttttgaccttgcagctattcccatcggagcttatgaaccgaggtggtttatgaaataccagcatgtagacccagaagaagctgtaaggattcacactgatgtccaaacaaagaaatctatggcaattcactggggaacttttgccttagcaaatgagcattacttagagcctccagtgaagctgaatgaagctctagagagatacggactttacgctgaagatttttttgtcttgaagcatggagaatcaagatacctaaataataatgatgaaaacttttaa

SEQ ID NO: 7034 - protein, 392 aa, Homo sapiens [sequence omitted]

SEQ ID NO: 7035 - DNA, 1182 bp, Pongo pygmaeus
  CDS (1)..(1182)
atggatgaaaatgaaagcaaccagtctctgatgacaagcagccaatatcctaaagaagcagtaagaaaacgtcaaaattcagcacggaattccggaggaagtgattcttctaggttttctaggaaaagcttcaaactggattataggctagaagaagatgtaactaaatccaagaaaggaaaagatgggagatttgtgaatccgtggccaacatggaaaaaccactctattccacatgttctcagatggctgataatggagaaagatcacagcagtgttccaagttctaaagaggaacttgacaaagaactcccagtgcttaagccatattttatcactaaccctgaagaagctggagtgagggaaactggcttaagagtcacatggctgggacatgccacggtaatggtggaaatggatgagctcatatttctcacggatcccatctttagctctcgtgcttcaccatcgcagtacatgggtccaaagcgatttcgtcgttccccgtgcacaataagtgaactccctccaatagatgcggtccttatcagtcacaaccactatgaccatctggactacaattctgtcattgctttgaatgagcgatttggtaatgagttgagatggtttgtgcctttgggtctccttgactggatgcaaaaatgtggctgtgagaatgtgattgagttggactggtgggaggagaattgtgtccccggacatgataaggtcacctttgtttttacaccttcccagcactggtgtaaaaggactctaatggatgacaacaaggtgctatggggcagctggtctgtcttggggccttggaatagatttttttttgcaggagatactggttattgccctgcttttgaagagataggaaaaagatttggaccttttgaccttgcagctattcccatcggagcttatgaaccaaggcggtttatgaaataccagcatgtagacccagaagaagctgtaaggattcacattgatgtccaaacaaagaaatctatggcaattcactggggaacttttgccttagcaaatgagcattacttagagcctccagtgaagctgaatgaagctctagagagatacggacttaacgctgaagatttttttgtcttgaagcatggagaatcaagatacctaaatactgatgatgaaaacttttaa

SEQ ID NO: 7036 - protein, 393 aa, Pongo pygmaeus
MDENESNQSLMTSSQYPKEAVRKRQNSARNSGGSDSSRFSRKSFKLDYRLEEDVTKSKKGKDGRFVNPWPTWKNHSIPHVLRWLIMEKDHSSVPSSKEELDKELPVLKPYFITNPEEAGVRETGLRVTWLGHATVMVEMDELIFLTDPIFSSRASPSQYMGPKRFRRSPCTISELPPIDAVLISHNHYDHLDYNSVIALNERFGNELRWFVPLGLLDWMQKCGCENVIELDWWEENCVPGHDKVTFVFTPSQHWCKRTLMDDNKVLWGSWSVLGPWNRFFFAGDTGYCPAFEEIGKRFGPFDLAAIPIGAYEPRRFMKYQHVDPEEAVRIHIDVQTKKSMAIHWGTFALANEHYLEPPVKLNEALERYGLNAEDFFVLKHGESRYLNTDDENF

SEQ ID NO: 7037 - DNA, 1095 bp, Brachydanio rerio
  CDS (1)..(1095)
atggcagagcaacctttagttggtgcaagtagcagcaccccgctggattacagacaggaggcagatgttacctgttccagacgggactcccaagggcgctttgtgaacccttggtcaacttggcatttcccctcctacactaccgttgctcgcctattcctcactgagaagaacaacagtaagattcccagtgccaaagaggctctggaccgtgagttgccaattgtgcagccatatttcatccagaatccagatcaatgtggccaaacaggcacatcagtgcgagcaacgtggctcggtcatgccactgtactggtggaaatggagggactgctggttctcactgatcccatattcagccaaagagcttcaccagtggcttttatgggccccaagcgctaccgtgacccgccatgcaccatagaacagcttcctcgcctggatgctgtggtgatcagtcacacacactatgatcacctggatgcagcctctgtgactgctctgaattctcgctttggctctgctctgcactggtttgtgccgctcgggcttgcagaatggatgcagaagacaggctgtgagaatgtcacagagctggactggtgggtcgggagccgaattcctgggcacgataatgtcagctttttttgcaccccagcacagcactggtgcaaacgtacacctgtggatgacaacaaaacattatggggaagctggagcatcgtagggtcccattcccgcttcttttttgctggagatacgggatactgtgcatcatttaaggaaatcggaagacactttggaccatttgacttggctgcaatcccaattggagcatatgtgcccagaggcatcatgaaatctcagcatgttgatcctgaagaggctgttcaaattcacatcgacgttcaagcaaaagcatctctggccattcactggggaacgtttcctttatcctatgagcattatcttgaacctccagcacgactgcgtgaggcaatggtgaatcttggacttaatccagatgacttcttcacacttcatcatggagagtcacgcatgatcaacctcaaggacatgcactcatccagctaa

SEQ ID NO: 7038 - protein, 364 aa, Brachydanio rerio
MAEQPLVGASSSTPLDYRQEADVTCSRRDSQGRFVNPWSTWHFPSYTTVARLFLTEKNNSKIPSAKEALDRELPIVQPYFIQNPDQCGQTGTSVRATWLGHATVLVEMEGLLVLTDPIFSQRASPVAFMGPKRYRDPPCTIEQLPRLDAVVISHTHYDHLDAASVTALNSRFGSALHWFVPLGLAEWMQKTGCENVTELDWWVGSRIPGHDNVSFFCTPAQHWCKRTPVDDNKTLWGSWSIVGSHSRFFFAGDTGYCASFKEIGRHFGPFDLAAIPIGAYVPRGIMKSQHVDPEEAVQIHIDVQAKASLAIHWGTFPLSYEHYLEPPARLREAMVNLGLNPDDFFTLHHGESRMINLKDMHSSS

SEQ ID NO: 7039 - DNA, 1044 bp, Caenorhabditis briggsae
  CDS (1)..(1044)
atgatagccgagctccagactcctgaaaatcatcagaattaccagaaaaatacgtttttgtatatcttattgaccggtactgtcatccagaaagtggttatgagtgttccgacaacatcaaacagagaaaaagaggaagaagaagcaggaggagaatatggaaatgaggatgagggaccgtttgcaagaccggtgaagaacgggaaaacattcgctaaccctccatccttcaaaaactggggtggaattccaggtttcttccaaattccaaaactccttttcaaagaaaccaacttggaaaacgtccccactgaccagcgaattcttgatgttgaaattccggtccacaacatcaccgcctcagacttccaaagtaattccgatctgtttgccacgtggctcggacatgctacagtactggtcagtctagaaggcgtcaagtttatcacggatccagtgtgggcggaacgagcatcattcaccagttttgctggtccaaagagatatcgaccacctccaatggaattagaggatctgccagagttagatttcgcagtggtctcccatgatcattacgatcatttggatgcagaagcaatttggtgtttgccagcacagcactggggccagcgtggaccattcgaccgtaacagaagactctggtccgggtgggcagtaattggtgagaatcggcgattctactattctggagacaccggaaattgtgattcggaattcaaaaagtttggaaagaagctcgggccattcgatttggcagctattccgattggagcgtatgagccgagatggttcatgaaatcacagcatattaatccggaagaagcgatcggagttcatgaaatgatccgatcgaagaatagtattggtattcattggggaacgtatcatatgggatcgtatgagtactatctggagccacgtgacaagctgaaagagctaatggacgctcgcgaagatctcaaggacacaaattttgtgacaattgaaatgggccgcatttgggaggctccggataaaaagtga

SEQ ID NO: 7040 - protein, 347 aa, Caenorhabditis briggsae
MIAELQTPENHQNYQKNTFLYILLTGTVIQKVVMSVPTTSNREKEEEEAGGEYGNEDEGPFARPVKNGKTFANPPSFKNWGGIPGFFQIPKLLFKETNLENVPTDQRILDVEIPVHNITASDFQSNSDLFATWLGHATVLVSLEGVKFITDPVWAERASFTSFAGPKRYRPPPMELEDLPELDFAVVSHDHYDHLDAEAIWCLPAQHWGQRGPFDRNRRLWSGWAVIGENRRFYYSGDTGNCDSEFKKFGKKLGPFDLAAIPIGAYEPRWFMKSQHINPEEAIGVHEMIRSKNSIGIHWGTYHMGSYEYYLEPRDKLKELMDAREDLKDTNFVTIEMGRIWEAPDKK

SEQ ID NO: 7041 - DNA, 975 bp, Bacillus stearothermophilus
  CDS (1)..(975): transl_table=11
gtgccgaaacgatacacgaatctcgacaacgtctcgacgcacaaaacatgggctgattttcgccgctggcaacgggagcggaaacaaaaacaaaaagatttgtcatacgttgtaccccgcatggagccgccgcaatccgaccggcttcacaagcccggcggacggccgcagctttgctgggttggccactcgacctttatcatgcagttggccggcgttacgatcgtcaccgacccggtttgggcgcagcggatgggcacggccaaacgcttgtcagctccgggcatcgcgcttgaggacatgccgcctgtggacgttgtgctcatctcccatggccactatgaccacttgcatatcggcagcctccgccgcttgccgggcgacccgcacgtgttcgtgcccgaggggctcggccgtctgctccgccgccgcggcttccgccatgtcactgagctgtcatggtggcgcacggctgaattccgcggcgtgacgctcacattcgttccagcccaacattggacacggcggacgctgtgggacacgaacacgtcgcattggggcggatgggtgatcacatcaaacggcgcccccaccatttacttcgccggcgacagcggctacttccgaggctttcgcgacatcggcgaccgcttttccatcgactatgcgctcttgccgatcggcgcctatgaaccggaatggttcatggggtcgcagcacacgaccccggaagaagccgtgcaggcgtttttggactgccgcgctcgcctgtttgtcccgatgcattacggggcgttccgcttggccgacgatacgccgaaagaagcgcttgaccgcctatgggctgaatggcggcggcgcggattggaagaggagcgcttgctttgcttgaagctcggcgaggtgatcgatgccgcccaactagccgcaagcggggggttcaggcgtgcggaatcgggcggaaacgagccataa

SEQ ID NO: 7042 - protein, 324 aa, Bacillus stearothermophilus
MPKRYTNLDNVSTHKTWADFRRWQRERKQKQKDLSYVVPRMEPPQSDRLHKPGGRPQLCWVGHSTFIMQLAGVTIVTDPVWAQRMGTAKRLSAPGIALEDMPPVDVVLISHGHYDHLHIGSLRRLPGDPHVFVPEGLGRLLRRRGFRHVTELSWWRTAEFRGVTLTFVPAQHWTRRTLWDTNTSHWGGWVITSNGAPTIYFAGDSGYFRGFRDIGDRFSIDYALLPIGAYEPEWFMGSQHTTPEEAVQAFLDCRARLFVPMHYGAFRLADDTPKEALDRLWAEWRRRGLEEERLLCLKLGEVIDAAQLAASGGFRRAESGGNEP

SEQ ID NO: 7043 - DNA, 1182 bp, Homo sapiens
  CDS (1)..(1182)
atggatgaaaatgaaagcaaccagtctctgatgacaagcagccaatatcctaaagaagcagtaagaaaacgtcaaaattcagcacggaattccggagcaagtgattcttctaggttttctaggaaaagcttcaaactggattatagactagaagaagatgtaactaaatccaagaaaggaaaagatgggagatttgtgaatccgtggccaacatggaaaaacccctctattccaaatgttctcagatggctgataatggagaaagatcacagcagtgttccaagttctaaagaggaactagacaaagaactcccagtgcttaagccatattttatcactaaccctgaagaagctggagtgagggaagctggcttaagagtcacatggctgggacatgccacggtaatggtggaaatggatgagctcatatttctcacggatcccatctttagctctcgtgcttcaccatcgcagtacatgggtccaaagcgatttcgtcgttccccgtgcacaataagtgaactccctccaatagatgcggtccttatcagtcacaaccactatgaccatctggactacaattctgtcattgctttgaatgagcgatttggtaatgagttgagatggtttgtgcctttgggtctccttgactggatgcaaaaatgtggctgtgagaatgtgattgagttggactggtgggaggagaattgtgtccccggacatgataaggtcacttttgtctttacaccttcccagcactggtgtaaaaggactctaatggatgacaacaaggtgctatggggcagctggtctgtcttggggccttggaatcgattttttttcgcaggagatactggttattgccctgcttttgaagagataggaaaaagatttggaccttttgaccttgcagctattcccatcggagcttatgaaccgaggtggtttatgaaataccagcatgtagacccagaagaagctgtaaggattcacactgatgtccaaacaaagaaatctatggcaattcactggggaacttttgccttagcaaatgagcattacttagagcctccagtgaagctgaatgaagctctagagagatacggacttaacgctgaagatttttttgtcttgaagcatggagaatcaagatacctaaataatgatgatgaaaacttttaa

SEQ ID NO: 7044 - protein, 393 aa, Homo sapiens
MDENESNQSLMTSSQYPKEAVRKRQNSARNSGASDSSRFSRKSFKLDYRLEEDVTKSKKGKDGRFVNPWPTWKNPSIPNVLRWLIMEKDHSSVPSSKEELDKELPVLKPYFITNPEEAGVREAGLRVTWLGHATVMVEMDELIFLTDPIFSSRASPSQYMGPKRFRRSPCTISELPPIDAVLISHNHYDHLDYNSVIALNERFGNELRWFVPLGLLDWMQKCGCENVIELDWWEENCVPGHDKVTFVFTPSQHWCKRTLMDDNKVLWGSWSVLGPWNRFFFAGDTGYCPAFEEIGKRFGPFDLAAIPIGAYEPRWFMKYQHVDPEEAVRIHTDVQTKKSMAIHWGTFALANEHYLEPPVKLNEALERYGLNAEDFFVLKHGESRYLNNDDENF

SEQ ID NO: 7045 - DNA, 1182 bp, Plasmodium yoelii yoelii
  CDS (1)..(1182)
atgagcaaactaataaacagcttgttgccctactatgtccataaaaatatattaacaccaaatctgagtttcaaaaagaaagttgattttttttttttttatttagatcgatatatttattcaccaatatttcataagttatgtggaaataaaaccgaaaatgaaaaaaataaattaaaaaaaaaatttgcaaaaaaattgaaacaaaaatttggtataaattttggtatatattcaaacgataactattatgataataatactaccaaatatgatgtaaataaaaatgaagaagtagaggtcgctgctttgtggcctaatcaaatatatcatgttaacccgttaaatgtaaaaaaagaaataaaagacaataaatttaatattgtttatattgggcatatgagtatattagtacaaatacaaaacttcaacatattaatagatcctgttttatcaaacaaaataggtttatataatattttaggtgtaaaaagaattataaaaccaggcttacgtttagaaaacattccaagcatcgattttattttattaagcaataatagatatgatacaatggattttgaaaccttaagaagaattgtattaagagataatagtattattattgggggaatgaatataagacgttatatgttaaaaagcaaatttccagttgtttatccattaaattggtttaataaattacaatttgaaaatttggctttttattatttacctacaataacaaatagtcatagatatatttttgataaaaatgtatatcttcctggctcattttttatacatgataaattacataatacctcaattttttatagtggtcattctgcttattcaaatcattttaaacaaattcaaaattatattaaaactattataaaaaatgatcaaattgatttatcaattttacctattggaatttataagcctcgtgaattatatgctcattttcacatgtctccctccgaagctttgcagacccatttagatttaaacagtaaaatgtctttgtgtgttggaacggatgttttttgtttagggggtgaaaaatataaagaagcaaatattgagctaagaaattcggtaagttattatgaaaagatggagaataaaaaagttaatcttattactttggaacctggccaaaatattatgctataa

SEQ ID NO: 7046 - protein, 393 aa, Plasmodium yoelii yoelii
MSKLINSLLPYYVHKNILTPNLSFKKKVDFFFFYLDRYIYSPIFHKLCGNKTENEKNKLKKKFAKKLKQKFGINFGIYSNDNYYDNNTTKYDVNKNEEVEVAALWPNQIYHVNPLNVKKEIKDNKFNIVYIGHMSILVQIQNFNILIDPVLSNKIGLYNILGVKRIIKPGLRLENIPSIDFILLSNNRYDTMDFETLRRIVLRDNSIIIGGMNIRRYMLKSKFPVVYPLNWFNKLQFENLAFYYLPTITNSHRYIFDKNVYLPGSFFIHDKLHNTSIFYSGHSAYSNHFKQIQNYIKTIIKNDQIDLSILPIGIYKPRELYAHFHMSPSEALQTHLDLNSKMSLCVGTDVFCLGGEKYKEANIELRNSVSYYEKMENKKVNLITLEPGQNIML

SEQ ID NO: 7047 - DNA, 2340 bp, Plasmodium yoelii yoelii
  CDS (1)..(2340)
atggctaatataaataatgaaaaaattcaaaaggatgaaaataaaaaaaaaaatgacaaatatgaagtttgtaattttcatcatgtatcatcatataaagaatgggttaaaaataaaataaaagaaaagaaaaaaataagtttgtttaatttaaaaaaaaaaaaaaaaactattaatattatatattttattactattcttatattattaaatataatttataatcgcttgatagatatatggtataattgggatgaaataatagaaaattatgatggaaataaaaaatgtgaaaaaccaaattattataatttgaataaatatataagacaatgtagtaatatttttaaatatttaataagagggtcatttgatggagatatatatgatgatgataataattttgaaaatgatttcatatatataaaaaatgataaaagtagaaatacaatatatttaaaaaaaatgttaggaagtgaaattattgataataattatataagtgtatatttagaaaatatgaaatatttaagaaatacaagtttaaactattcgataaatcaaagatctttgtctacagaatggtatgtttattttcgtagttttttaaaacaagctatatcacctcatagtttaacaaaagctataaaaatagataaagaatatatatatccttgggatgtaataacacaagatgatgctgaaaaaataattgaaaatgcgaaattttatggttttttatttacatggtttaaaaatcataggaaagcacaaaaagttaatgaaataattttaagaaaagatatgcctgttttaactcctaaatttataaaatcagatttttcccaacgtttatataaaaataataaaaataatgaacccaatttttatggaatacattatacatggttagggcatgcaactggtttagttattgtcgatggattcaaaatattagttgatcctgtttttaaaatcgaattattaagtcttaaaggaattgcaagatctttaataaattgggtaaacataaaaataatgggtgggttaggtgaacgtatatcaaaatctccatgtaacatttcaaatcttcctgatgatttacatgccgtttttatttcacataatcataatgatcatataatggaagaagatgtaagaattttatgcaaattaaaaaaatttaaagatgttatgtggtatgtaccggaaggtacaacttctttttttatacaagaaggttgtaaaacagataaaatttatgaattatcttggggtgatgaaagatgggtatcatgttggataaataataataaatttacatgtagagatggattatggaataataaaaaaggtgatacagatgtatataaatataaaattatatatgctccagcattacattggtcaggtagaaaaggtgatttaagtgacattaaccaatcattatggggttcattaatattaaaaggacctaaatcaaaattttatttttctggagatactgcatatttaaaagatgattttgaagagtttaaaaaaattggaaaattgcatggaccttttgattttgctgctatatctataggagcatatgaaccaaacaattcactaaaatatcatcatatacatccatgggaatctgtaaaaatatggagagatattcgagctgaaatggctattggagtacattggggtacatttcgtctttctgcagaagaatttttacaacctagagatgatttagaagctgctttattaggtgttagtttaagtaatttaagaaattataatcttacatttgaaaaaaaaaaaatggaagtttttaaaaaatatatgataaaaaatgtaaactcaaataataatgatatagatgatttagaagatttaaaggaatatttttatcctgcttctttaacagattataatgaatatacagatagttttcattcaattttttctaataatttaagtttattttattcagatattgataaaaattatataaaacatatgtatcaacaaaaaaaattatatttgtctacttataatagatataaaagagcattaatattaaaaaattcaaaaaaattaccaaaatcttggaaaaaattattacttaatctttcgattcgatttcaaactattcctattggtgggtctatagaaattacaacaaaagatgacacaatttcgatgacacgatcaactgaatataattctactatttatgaacattatacatttccaaaatggtataaaaaaaaagagacagaagaaactctttaccaatataatgttccacatgaagatttaatgacattttctatagttagctaa

SEQ ID NO: 7048 - protein, 779 aa, Plasmodium yoelii yoelii
MANINNEKIQKDENKKKNDKYEVCNFHHVSSYKEWVKNKIKEKKKISLFNLKKKKKTINIIYFITILILLNIIYNRLIDIWYNWDEIIENYDGNKKCEKPNYYNLNKYIRQCSNIFKYLIRGSFDGDIYDDDNNFENDFIYIKNDKSRNTIYLKKMLGSEIIDNNYISVYLENMKYLRNTSLNYSINQRSLSTEWYVYFRSFLKQAISPHSLTKAIKIDKEYIYPWDVITQDDAEKIIENAKFYGFLFTWFKNHRKAQKVNEIILRKDMPVLTPKFIKSDFSQRLYKNNKNNEPNFYGIHYTWLGHATGLVIVDGFKILVDPVFKIELLSLKGIARSLINWVNIKIMGGLGERISKSPCNISNLPDDLHAVFISHNHNDHIMEEDVRILCKLKKFKDVMWYVPEGTTSFFIQEGCKTDKIYELSWGDERWVSCWINNNKFTCRDGLWNNKKGDTDVYKYKIIYAPALHWSGRKGDLSDINQSLWGSLILKGPKSKFYFSGDTAYLKDDFEEFKKIGKLHGPFDFAAISIGAYEPNNSLKYHHIHPWESVKIWRDIRAEMAIGVHWGTFRLSAEEFLQPRDDLEAALLGVSLSNLRNYNLTFEKKKMEVFKKYMIKNVNSNNNDIDDLEDLKEYFYPASLTDYNEYTDSFHSIFSNNLSLFYSDIDKNYIKHMYQQKKLYLSTYNRYKRALILKNSKKLPKSWKKLLLNLSIRFQTIPIGGSIEITTKDDTISMTRSTEYNSTIYEHYTFPKWYKKKETEETLYQYNVPHEDLMTFSIVS

SEQ ID NO: 7049 - DNA, 1119 bp, Mycobacterium tuberculosis
  CDS (1)..(1119): transl_table=11
atggtgcgccgagcgctacgactggcggccggcaccgcctcgctggccgccggcacgtggctgttgcgtgcgctgcacggcacgccggccgcgctcggtgccgacgcggcgtcgatcagggctgtgtcggagcaatcgccgaactatcgtgacggcgccttcgtcaacctggatcccgcgtcgatgttcaccctggatcgcgaggagcttcggctcatcgtgtgggagttagtggccagacacagtgcgagccggccggcggcgccgatcccgttggcctcgccgaatatctaccggggtgacgccagccggctcgccgtcagctggttcggtcactcgacggcgctgctggaaatcgacggctaccgggtgcttaccgatccggtgtggagcgatcggtgctcaccgtccgacgtcgtcggcccccagcgcctgcatccgccgccggtgcaactggcagctctcccggccgtcgacgccgtggtcatcagccacgaccactacgaccatctcgatatcgacaccgtggttgcgctggtcggcatgcaacgggccccgttccttgtgccgctcggggtcggcgcccaccttcggtcgtggggtgttccgcaggatcgcattgttgagctcgactggaaccagagcgctcaggtcgatgagctcaccgtggtctgcgtgccggcacggcacttctcgggacggttcctgagccgcaacaccacactgtgggcctcgtgggcgtttgttgggccgaaccatcgcgcctacttcggcggtgataccggatacaccaagagcttcacccagatcggcgcggaccacggaccgttcgacctgaccctgctgcccatcggggcctacaacacggcgtggccggacatccacatgaaccccgaggaggcggtccgggcgcacctggacgtcaccgattcgggctcgggaatgctggtgccggtgcactggggcaccttccggctggccccccatccgtggggcgagccggtcgagcggctgctcgcggcggctgaacccgagcacgtcacggtagccgtgccgctacccggtcagcgggtcgacccgaccgggcccatgagattgcacccatggtggcggctgtaa

SEQ ID NO: 7050 - protein, 372 aa, Mycobacterium tuberculosis
MVRRALRLAAGTASLAAGTWLLRALHGTPAALGADAASIRAVSEQSPNYRDGAFVNLDPASMFTLDREELRLIVWELVARHSASRPAAPIPLASPNIYRGDASRLAVSWFGHSTALLEIDGYRVLTDPVWSDRCSPSDVVGPQRLHPPPVQLAALPAVDAVVISHDHYDHLDIDTVVALVGMQRAPFLVPLGVGAHLRSWGVPQDRIVELDWNQSAQVDELTVVCVPARHFSGRFLSRNTTLWASWAFVGPNHRAYFGGDTGYTKSFTQIGADHGPFDLTLLPIGAYNTAWPDIHMNPEEAVRAHLDVTDSGSGMLVPVHWGTFRLAPHPWGEPVERLLAAAEPEHVTVAVPLPGQRVDPTGPMRLHPWWRL

SEQ ID NO: 7051 - DNA, 25 bp, Artificial sequence
  primer
atgaattttgttacctgccatgttc

SEQ ID NO: 7052 - DNA, 24 bp, Artificial sequence
  primer
ttagtcgaagcattctgtcttgcc

SEQ ID NO: 7053 - protein, 465 aa, Artificial sequence
  consensus sequence
  Variant (2)..(2): Xaa in position 2 is any amino acid
  Variant (4)..(4): Xaa in position 4 is any amino acid
  Variant (9)..(9): Xaa in position 9 is any amino acid
  Variant (12)..(18): Xaa in position 12 to 18 is any amino acid
  Variant (19)..(32): Xaa in position 19 to 32 is any or no amino acid
  Variant (34)..(34): Xaa in position 34 is any amino acid
  Variant (39)..(51): Xaa in position 39 to 51 is any amino acid
  Variant (52)..(77): Xaa in position 52 to 77 is any or no amino acid
  Variant (80)..(80): Xaa in position 80 is any amino acid
  Variant (83)..(83): Xaa in position 83 is any amino acid
  Variant (84)..(88): Xaa in position 84 to 88 is any or no amino acid
  Variant (94)..(94): Xaa in position 94 is any amino acid
  Variant (101)..(102): Xaa in position 101 to 102 is any amino acid
  Variant (105)..(106): Xaa in position 105 to 106 is any or no amino acid
  Variant (108)..(120): Xaa in position 108 to 120 is any or no amino acid
  Variant (122)..(122): Xaa in position 122 is any or no amino acid
  Variant (124)..(143): Xaa in position 124 to 143 is any or no amino acid
  Variant (145)..(148): Xaa in position 145 to 148 is any or no amino acid
  Variant (151)..(154): Xaa in position 151 to 154 is any amino acid
  Variant (155)..(199): Xaa in position 155 to 199 is any or no amino acid
  Variant (202)..(202): Xaa in position 202 is any amino acid
  Variant (206)..(206): Xaa in position 206 is any amino acid
  Variant (208)..(214): Xaa in position 208 to 214 is any amino acid
  Variant (215)..(220): Xaa in position 215 to 220 is any or no amino acid
  Variant (223)..(224): Xaa in position 223 to 224 is any amino acid
  Variant (226)..(226): Xaa in position 226 is any amino acid
  Variant (228)..(233): Xaa in position 228 to 233 is any amino acid
  Variant (234)..(272): Xaa in position 234 to 272 is any or no amino acid
  Variant (274)..(275): Xaa in position 274 to 275 is any amino acid
  Variant (281)..(283): Xaa in position 281 to 283 is any amino acid
  Variant (284)..(296): Xaa in position 284 to 296 is any or no amino acid
  Variant (298)..(299): Xaa in position 298 to 299 is any or no amino acid
  Variant (301)..(304): Xaa in position 301 to 304 is any amino acid
  Variant (306)..(307): Xaa in position 306 to 307 is any amino acid
  Variant (308)..(316): Xaa in position 308 to 316 is any or no amino acid
  Variant (318)..(319): Xaa in position 318 to 319 is any amino acid
  Variant (321)..(322): Xaa in position 321 to 322 is any amino acid
  Variant (324)..(324): Xaa in position 324 is any amino acid
  Variant (326)..(328): Xaa in position 326 to 328 is any amino acid
  Variant (330)..(331): Xaa in position 330 to 331 is any amino acid
  Variant (332)..(348): Xaa in position 332 to 348 is any or no amino acid
  Variant (351)..(351): Xaa in position 351 is any amino acid
  Variant (353)..(355): Xaa in position 353 to 355 is any amino acid
  Variant (357)..(361): Xaa in position 357 to 361 is any amino acid
  Variant (363)..(367): Xaa in position 363 to 367 is any amino acid
  Variant (368)..(373): Xaa in position 368 to 373 is any or no amino acid
  Variant (375)..(375): Xaa in position 375 is any amino acid
  Variant (380)..(380): Xaa in position 380 is any amino acid
  Variant (382)..(382): Xaa in position 382 is any amino acid
  Variant (384)..(387): Xaa in position 384 to 387 is any amino acid
  Variant (388)..(436): Xaa in position 388 to 436 is any or no amino acid
  Variant (439)..(441): Xaa in position 439 to 441 is any amino acid
  Variant (443)..(455): Xaa in position 443 to 455 is any amino acid
  Variant (456)..(464): Xaa in position 456 to 464 is any or no amino acid
VXWXGHSTXLIXXXXXXXXXXXXXXXXXXXXXLXDPVFXXXXXXXXXXXXXXXXXXXXXXXXXXXXXXXXXXXXXXXLPXIDXXXXXXVLISHXHYDHLDXXTIXXLXXXXXXXXXXXXXPXGXXXXXXXXXXXXXXXXXXXXVXXXXWWXXXXXXXXXXXXXXXXXXXXXXXXXXXXXXXXXXXXXXXXXXXXXXXXXPAXHWSXRXXXXXXXXXXXXXLWXXWXIXXXXXXXXXXXXXXXXXXXXXXXXXXXXXXXXXXXXXXXXXXXXXYXXGDTGYXXXXXXXXXXXXXXXXFXXIXXXXGXXXXXXXXXXXLXXLXXGXYXXXWXXXXXXXXXXXXXXXXXXXHMXPXXXVXXXXXLXXXXXXXXXXXLXIHWGXFXLXXXXXXXXXXXXXXXXXXXXXXXXXXXXXXXXXXXXXXXXXXXXXXXXXXXXXEPXXXLXXXXXXXXXXXXXXXXXXXXXXG

SEQ ID NO: 7054 - protein, 19 aa, Artificial sequence
  Consensus sequence
  Variant (3)..(3): Xaa in position 3 is any amino acid
  Variant (4)..(4): Xaa in position 4 is Ala, Ser or Thr
  Variant (5)..(14): Xaa in position 5 to 14 is any amino acid
  Variant (15)..(15): Xaa in position 15 is Ile, Leu, Met or Val
  Variant (16)..(16): Xaa in position 16 is any amino acid
  Variant (19)..(19): Xaa in position 19 is Phe, Ile, Met or Val
GHXXXXXXXXXXXXXXDPX

SEQ ID NO: 7055 - protein, 18 aa, Artificial sequence
  Consensus sequence
  Variant (2)..(2): Xaa in position 2 is any amino acid
  Variant (3)..(7): Xaa in position 3 to 7 is any or no amino acid
  Variant (9)..(9): Xaa in position 9 is Cys, Asp, Gly, Asn, Ser or Thr
  Variant (11)..(11): Xaa in position 11 is any amino acid
  Variant (15)..(17): Xaa in position 15 to 17 is any amino acid
  Variant (18)..(18): Xaa in position 18 is Ala, Ser, Thr or Val
IXXXXXXHXHXDHLXXXX

SEQ ID NO: 7056 - protein, 19 aa, Artificial sequence
  Consensus sequence
  Variant (3)..(3): Xaa in position 3 is Gly, Ser or Thr
  Variant (5)..(12): Xaa in position 5 to 12 is any amino acid
  Variant (13)..(18): Xaa in position 13 to 18 is any or no amino acid
GDXGXXXXXXXXXXXXXXG

SEQ ID NO: 7057 - protein, 29 aa, Artificial sequence
  Consensus sequence
  Variant (2)..(3): Xaa in position 2 to 3 is any amino acid
  Variant (4)..(4): Xaa in position 4 is Ala or Pro
  Variant (5)..(15): Xaa in position 5 to 15 is any amino acid
  Variant (16)..(16): Xaa in position 16 is Ala, Gly, Gln, Ser or Thr
  Variant (17)..(20): Xaa in position 17 to 20 is any amino acid
  Variant (21)..(21): Xaa in position 21 is Ala, Gly, Leu or Pro
  Variant (22)..(22): Xaa in position 22 is any amino acid
  Variant (24)..(27): Xaa in position 24 to 27 is any amino acid
  Variant (28)..(28): Xaa in position 28 is any or no amino acid
HXXXXXXXXXXXXXXXXXXXXXHXXXXXL

SEQ ID NO: 7058 - DNA, 546 bp, Saccharomyces cerevisiae
  CDS (1)..(546)
atgagacagctaacagaagaagagaccaaggttgttttcgaaaaactcgccggctatattggtagaaatatttcttttttagtggataataaagaacttcctcatgtcttcagattacaaaaggatagagtatattacgtacccgatcatgttgcaaaattggctactagtgtagcaagacctaacttgatgtctctgggtatttgtttaggtaaattcacgaaaactggaaaattcaggttacatattacttctttgacagtattggctaagcatgccaaatataagatatggattaaacctaatggggagatgccattcttatacggtaatcatgtgttaaaggcacatgtgggtaaaatgtctgatgatataccagaacacgccggtgttattgtgtttgcaatgaatgatgtgccattagggttcggtgtcagtgcgaaaagtacttctgagtcaagaaacatgcaacccactggtatagttgctttcagacaagcagatattggtgagtatttgagagatgaagacaccttgtttacttag

SEQ ID NO: 7059 - protein, 181 aa, Saccharomyces cerevisiae
MRQLTEEETKVVFEKLAGYIGRNISFLVDNKELPHVFRLQKDRVYYVPDHVAKLATSVARPNLMSLGICLGKFTKTGKFRLHITSLTVLAKHAKYKIWIKPNGEMPFLYGNHVLKAHVGKMSDDIPEHAGVIVFAMNDVPLGFGVSAKSTSESRNMQPTGIVAFRQADIGEYLRDEDTLFT

SEQ ID NO: 7060 - DNA, 543 bp, Danio rerio
  CDS (1)..(543)
atgcgtccgttaacagacgaagagacgaaaacgatgttcgagaaactctctaaatacattggggagaacatcaagcttcttatcgatcggccggatgggacttactgtttcagacttcataatgatcgagtatattatatgagtgaaaaaatcctgaagttggcaacaaatgtctccagagataaactggtatcagttggcacgtgtttcggaaagttcacgaagacacaaaagttccgcctgcacatcacagctctcgatttcctcgcaccgtatgctaagtttaaggtgtgggtgaagccgggatcggagcaatcattcctgtatggaaaccacatcatgaagtccggcctgggcagaatcacagaaaacacagacaagtaccagggagtgctggtgtattcaatggctgacgtaccactcggttttggagttgcagcgagaacaacacaggagtgcaggaaagtcgaccccatggctattgtggttttccatcaggctgatattggagaatatatcagaagtgaagatactctgacataa

SEQ ID NO: 7061 - protein, 180 aa, Danio rerio
MRPLTDEETKTMFEKLSKYIGENIKLLIDRPDGTYCFRLHNDRVYYMSEKILKLATNVSRDKLVSVGTCFGKFTKTQKFRLHITALDFLAPYAKFKVWVKPGSEQSFLYGNHIMKSGLGRITENTDKYQGVLVYSMADVPLGFGVAARTTQECRKVDPMAIVVFHQADIGEYIRSEDTLT

SEQ ID NO: 7062 - DNA, 603 bp, Guillardia theta
  CDS (1)..(603)
atgtataaaatttttttgcattataaatatactttaatatttaattatctatttaggattcttatggttagatctttaagatatgaagaattaagaattatgttctgtaatattttgaagtatataggagaaaatattagtgattttatacagaaagtgattgatttagaaatttactttaggctatatcgtaaaagaatttctttttctaaaaaaaaattaattaacaattcgaactgttttaccttaaaaaaaatagcaagtgttggagtttttatgggaaaattcttcattggaaaaagatttttgttttttatttcttttataaatgttattaaaggatttgatacttataaatacggagttgttagttctcatggtgaaaaacattttactaaaggtaataatctaaaaagatctcatttcattaagatatctaataattttgttaaaggagatgggatatttattaaagataattctaataacattctaggatttggattgacaacgaaagattattatattgtaaaatctaatcatcctaatcttttgttaatcaactttagcgacgtaggaatttatattcgaataaaatattaa

SEQ ID NO: 7063 - protein, 200 aa, Guillardia theta
MYKIFLHYKYTLIFNYLFRILMVRSLRYEELRIMFCNILKYIGENISDFIQKVIDLEIYFRLYRKRISFSKKKLINNSNCFTLKKIASVGVFMGKFFIGKRFLFFISFINVIKGFDTYKYGVVSSHGEKHFTKGNNLKRSHFIKISNNFVKGDGIFIKDNSNNILGFGLTTKDYYIVKSNHPNLLLINFSDVGIYIRIKY

SEQ ID NO: 7064 - DNA, 543 bp, Caenorhabditis elegans
  CDS (1)..(543)
atgcgtccactgacagaagaagagacatcgcttgtatttgccaagttggcctcgttcatcggagacaatgtctcgatgctcatcgacagaaatgatggagattattgcttcagaaatcacaaggaacgtgtctattactgttcggaaaatctgatgcgtcaagccgcctgcattgcccgtgagccacttctctcttttggaacttgcttgggaaagttcaccaaaagcaaaaagttccatctccaaatcaccgctctcgactatttggcgccgtatgccaagttcaaggtgtggctgaagccgaacgccgagcagcaattcctttacggaaacaacattctcaagtctggaatcgcaagaatgaccgacggaactccaactcatgctggaatcgtcgtatactcgatgaccgatgttccattgggattcggagtgtcagcgaaaggaacatcagacagtaagcgtgccgatccaactgctctcgtcgttctacatcaatgcgatcttggagagtatctcagaaatgagagtcatctcgcttaa

SEQ ID NO: 7065 - protein, 180 aa, Caenorhabditis elegans
MRPLTEEETSLVFAKLASFIGDNVSMLIDRNDGDYCFRNHKERVYYCSENLMRQAACIAREPLLSFGTCLGKFTKSKKFHLQITALDYLAPYAKFKVWLKPNAEQQFLYGNNILKSGIARMTDGTPTHAGIVVYSMTDVPLGFGVSAKGTSDSKRADPTALVVLHQCDLGEYLRNESHLA

SEQ ID NO: 7066 - DNA, 531 bp, Encephalitozoon cuniculi GB-M1
  CDS (1)..(531)
atgagagacttaaagccagaggaggaaaaggaggttctcaagaagcttaggttcttcatcggcgacaatgtccacaggattctttctggagaagacaggctttttctgcacaaccagcgtgttatgattctttctgaaaggatgagggcagcaacatctatgatatccaggaagaacctcggcatggtcggaacagtgataggcaagttcactaagagcgggagtttcaggctgggagtagcgtccttgaatctcctctcccggtgggcaatacataaggtctggatcaagaatagtgcagagatgaactatgtctatggaaacaacgcattgaaatcccacgtattccggatctcagagggaattcccataaactcgggtgtctttgtgttcaatcagcacgacgttcctctagggtttggaattactgccctgtctccacagggatattctgctgcaaaggggcatgcgcttgctatactgagacagtcagacacgggagagtatgttcgaaacgaggcgagggtgtga

SEQ ID NO: 7067 - protein, 176 aa, Encephalitozoon cuniculi GB-M1
MRDLKPEEEKEVLKKLRFFIGDNVHRILSGEDRLFLHNQRVMILSERMRAATSMISRKNLGMVGTVIGKFTKSGSFRLGVASLNLLSRWAIHKVWIKNSAEMNYVYGNNALKSHVFRISEGIPINSGVFVFNQHDVPLGFGITALSPQGYSAAKGHALAILRQSDTGEYVRNEARV

SEQ ID NO: 7068 - DNA, 543 bp, Schizosaccharomyces pombe 972h-
  CDS (1)..(543)
atgaggcctttaactcatgaagagacaaagactttctttgaaaaattggctcagtacattggaaaaaatattactcatttaatagaccgtccggatgatcctcattgctttcgtttacaaaaagatcgtgtttattatgttagtgaacgtgcaatgaaaatggctacatctgtagctcgccaaaatctgatgtcgttgggtatttgctttggcaagtttaccaagacaaacaaatttcgcttgcatattactgctttagattacatagcccaatacgctcgctataaaatttgggttaaaagtaatggtgaaatgccgttcctctatggcaatcatgttttgaaggcacacgtgggtcgaatcacagatgacactcctcaacatcaaggtgtcgttatttattccatgaatgacactcctttaggttttggtgtaactgctcgctctactcttgaattgcgacgccttgagcctacagctattgttgctttccatcaagcagatgttggtgaatatcttcgtgatgaagatactcttttttag

SEQ ID NO: 7069 - protein, 180 aa, Schizosaccharomyces pombe 972h-
MRPLTHEETKTFFEKLAQYIGKNITHLIDRPDDPHCFRLQKDRVYYVSERAMKMATSVARQNLMSLGICFGKFTKTNKFRLHITALDYIAQYARYKIWVKSNGEMPFLYGNHVLKAHVGRITDDTPQHQGVVIYSMNDTPLGFGVTARSTLELRRLEPTAIVAFHQADVGEYLRDEDTLF

SEQ ID NO: 7070 - DNA, 543 bp, Drosophila melanogaster
  CDS (1)..(543)
atgaaacgcctgagcgacgaacgtgccaagatcttgttcgagcacctgtccaaatacattggcacaaatgtgaagcatttgattgaccggccagatggaacatattgctttcgggagcacaaggatcgggtctactacgtctcggagcggattttgaagctgagcgagtgcttcggctacaagcagctggtgtgcgtgggcacctgcttcggcaagttctccaagaccaacaaactgaagttccatatcacggccctctactacttggcgccctacgcccagtacaaggtgtgggtgaagccctccttcgagcagcagtttctctacggcaaccacatacccaaaacaggactgggtcgcatcacggagaacgccggccagtaccagggcgtggtggtctactccatgaacgacctgcctctgggcttcggcgtactggcgcgttccacaacggactgcaagaccgccgatcccatgaccaccgtatgctttcatcagtcggatatcggcgaatatattcgcgccgaggacacgctcttttag

SEQ ID NO: 7071 - protein, 180 aa, Drosophila melanogaster
MKRLSDERAKILFEHLSKYIGTNVKHLIDRPDGTYCFREHKDRVYYVSERILKLSECFGYKQLVCVGTCFGKFSKTNKLKFHITALYYLAPYAQYKVWVKPSFEQQFLYGNHIPKTGLGRITENAGQYQGVVVYSMNDLPLGFGVLARSTTDCKTADPMTTVCFHQSDIGEYIRAEDTLF

SEQ ID NO: 7072 - DNA, 555 bp, Plasmodium falciparum 3D7
  CDS (1)..(555)
atgaaatatgaatatatgatatatatcatgaaaaaaaataaaataagagattttttattttatacaaaaggtgttggaaataatctgttaacaatgttgtcttatagtaacgaagaatatatattaagattgcatagatcaaacgtatattttgttagagctgacgtggccaaacaagctgaatcattaaataaaaattcactgatatctatgggaatatgcttgggaaaatttaccaagacgaataattttttcataaaaataacagctatatcatttttaaaccagttttgcattcataaaatttggttaaaagaatcaggggaaaagaactttttatttggaaataatgtgttaaagagccatttattaaaaattagtgataacataaaaaaaggagatgggataatggttttgtctatgaatgataaccctataggtttcggtatatcagtacgaaacacacaagatattaaaatcttaaacgttacggatactgtattaattcatcagagtgatatcggtgaatatttaagatgtgaaacagccatataa

SEQ ID NO: 7073 - protein, 184 aa, Plasmodium falciparum 3D7
MKYEYMIYIMKKNKIRDFLFYTKGVGNNLLTMLSYSNEEYILRLHRSNVYFVRADVAKQAESLNKNSLISMGICLGKFTKTNNFFIKITAISFLNQFCIHKIWLKESGEKNFLFGNNVLKSHLLKISDNIKKGDGIMVLSMNDNPIGFGISVRNTQDIKILNVTDTVLIHQSDIGEYLRCETAI

SEQ ID NO: 7074 - DNA, 546 bp, Eremothecium gossypii
  CDS (1)..(546)
atgagacagctaacagaggaagagacgaaggtggtgttcgaaaagttggcggggtacatcggacggaatatttcctacctggtcgacaataaggagcagccacatgtgttcaggctgcagaaagatagggtttactacatgccagagcacattgcgaagctggccacatgtgttgcgaggccgaatctgatgtcgctgggcatctgtcttgggaagtttacaaaaacggggaagttcagactgcacattacggcgctaacggtgttggcgcagcatgcgaagtacaaggtatggatcaagcccaatggcgagatgccattcctgtacggcaaccatgtcctgaaggcgcacgttggcaagatgtcggacgacataccggagcactcgggtgtgatcgtgttttcgatgcatgacgttccattggggttcggggtcagtgccaagagcacgtcagaggctcgcgacctgcagcccatgggcattgttgcattcagacaggcggacatcggtgaatacttgagagacgaggatacgttgtttacgtga

SEQ ID NO: 7075 - protein, 181 aa, Eremothecium gossypii
MRQLTEEETKVVFEKLAGYIGRNISYLVDNKEQPHVFRLQKDRVYYMPEHIAKLATCVARPNLMSLGICLGKFTKTGKFRLHITALTVLAQHAKYKVWIKPNGEMPFLYGNHVLKAHVGKMSDDIPEHSGVIVFSMHDVPLGFGVSAKSTSEARDLQPMGIVAFRQADIGEYLRDEDTLFT

SEQ ID NO: 7076 - DNA, 543 bp, Anopheles gambiae str. PEST
  CDS (1)..(543)
atgaaacgactatcagaacagcaaacaaaagttttgtttgaaaagttatcaaaatacatcggaacgaacgtaaagctgctgatagaccggtccgatggtacctactgctttcgggagatgaaatcccgcgtctactacatgtcggagaagatcctaaagctcgcggaaacggtaccgaaagaacacatggtatcggttgggacgtgctttggcaagttcaccaagggcaacaagttcatactgcacataacggcgctcacctacctggccccgtacgcacagtacaagatctggctgaagccggccgccgagcagcagttcctgtacggcaacaatgtggccaagtcgggcatgggccgcatcacggaaaacacccccgtgtaccagggcgtgattgtcatgtcgatgagcgacgtgccgctcgggttcggtgtggcggccaaatctaccaacgactgcaagctggccgatccgctcgtgacggtgtgcttccatcaagcggacataggcgaatacattcgatcggaggaaaatctaatttag

SEQ ID NO: 7077 - protein, 180 aa, Anopheles gambiae str. PEST
MKRLSEQQTKVLFEKLSKYIGTNVKLLIDRSDGTYCFREMKSRVYYMSEKILKLAETVPKEHMVSVGTCFGKFTKGNKFILHITALTYLAPYAQYKIWLKPAAEQQFLYGNNVAKSGMGRITENTPVYQGVIVMSMSDVPLGFGVAAKSTNDCKLADPLVTVCFHQADIGEYIRSEENLI

SEQ ID NO: 7078 - DNA, 621 bp, Neurospora crassa
  CDS (1)..(621)
atgcgccctcttacagaaacggagcagaagaccgtcttcgagaagcttgcaaactactgcaccgatctcaagagtcttatcgctcctctcgatgatggcgacagatacgttttccgtctgaaccactctcgcgtttactacgtccgtctctccgttgccaacctcgccaccagtgtcagccgcgatgccctcctcagcctgggtacctgccttggaaagatgaccaagacgggaaagttcagacttcacatcactgcccttcctatcctctcggagcacgcccgtcataagatctgggtcaaggacaacggtgcccagcccttcctctacggctcgaacggtatacctctccatctcctggttctctgtcctactagcctcatgaaaactaacgggcatttgaaaacagtcgtcaaggcccacgtcggccgttggtccgaggactgccccgagcactccggtgtcgtcgtctacagcatggctgatatcccccttggcttcggtgtcacagctcgtagcacaaccgaggcacgccgccttgatcccacgggtatcgtttgcttccgtcaatcggactgcggcgagtacctccgtgatgaggacaccctctttgctggttaa

SEQ ID NO: 7079 - protein, 206 aa, Neurospora crassa
MRPLTETEQKTVFEKLANYCTDLKSLIAPLDDGDRYVFRLNHSRVYYVRLSVANLATSVSRDALLSLGTCLGKMTKTGKFRLHITALPILSEHARHKIWVKDNGAQPFLYGSNGIPLHLLVLCPTSLMKTNGHLKTVVKAHVGRWSEDCPEHSGVVVYSMADIPLGFGVTARSTTEARRLDPTGIVCFRQSDCGEYLRDEDTLFAG

SEQ ID NO: 7080 - DNA, 558 bp, Magnaporthe grisea 70-15
  CDS (1)..(558)
atgcgtcccttgacagataccgagacgcaaacgctgctagccaagctggccaactacacaggaaactccctcaagagcctgatcgctcccctcgaggacggcgaccgctatgttttccgcctgcacaaggatcgggtttactatgtcaagctcagcatagcgaacctggccaccacaatagcgagggataagctcatgtcgctcggtacttgcctgggcaaattcacaaagtctggaaaattccgtcttcacatcacggccctcccgatcctctccgagcacgcccgctacaagatgtgggttcgctcaaacggcgagatgcccttcctttacggtggaaatgtcgtcaaggcacatgtaggacgtcagacagacgactgccccgagcaccagggtattgtggtttacaacatgcaggacgtccccctgggtttcggcctcaccgccaagagcaccgccgacgctcgacgactcgatcccacgggtattacttgcttcaggcaatccgactgtggcgagtacctgcgtgacgaagatgccctcttcgctactggctga

SEQ ID NO: 7081 - protein, 185 aa, Magnaporthe grisea 70-15
MRPLTDTETQTLLAKLANYTGNSLKSLIAPLEDGDRYVFRLHKDRVYYVKLSIANLATTIARDKLMSLGTCLGKFTKSGKFRLHITALPILSEHARYKMWVRSNGEMPFLYGGNVVKAHVGRQTDDCPEHQGIVVYNMQDVPLGFGLTAKSTADARRLDPTGITCFRQSDCGEYLRDEDALFATG

SEQ ID NO: 7082 - DNA, 567 bp, Gibberella zeae PH-1
  CDS (1)..(567)
atgcgccccctcacagaaaaggagacacagactctcttcgagaagctggcaaactacactggaggctctcttaagaacctcatcgcccctctcgacgactctcccaacgctgatcgctatgtcttccgcctggttcgcgatcgtgtcttttacgtccgcctttccattgccaacctggctacttctattgcgcgcgagaagcttctgtctctaggcacatgtctcggcaagttcaccaagacgggcaagttccgtctgcacgtcacagccctccccatcatcgccgagcacgcccgctacaagatctgggtcaaggagaacggaaccatgcctttcctctacggcagcaacatcgtcaaggcccacgttggccgttggtccgaggactgccctgagcaccagggagtcgtggtctacagcatgaacgacaccccgctcggatttggtgttacagcccgcagcaccgctgaggcgcgaagactggaccctactggtattacctgcttcagacaggccgattgtggagagtacctccgtgacgaagacaacttgtttgcgaccggttag

SEQ ID NO: 7083 - protein, 188 aa, Gibberella zeae PH-1
MRPLTEKETQTLFEKLANYTGGSLKNLIAPLDDSPNADRYVFRLVRDRVFYVRLSIANLATSIAREKLLSLGTCLGKFTKTGKFRLHVTALPIIAEHARYKIWVKENGTMPFLYGSNIVKAHVGRWSEDCPEHQGVVVYSMNDTPLGFGVTARSTAEARRLDPTGITCFRQADCGEYLRDEDNLFATG

SEQ ID NO: 7084 - DNA, 567 bp, Aspergillus nidulans FGSC A4
  CDS (1)..(567)
atgcgccccctcacagaagaagagacgcagacgctcttcaagaagcttgcggagtactgcgggtcaggcctgaaggagcttatcaaaccgcttgattcttctcccaacgccgatcgctatgtcttccgactgtcaggcaaccgtgtctattactccctcttgtcgatagccaacgcagccaccgcatttcctcgcgatcagctcctctccctcggaatatgcatgggcaaattcaccaagactggcaaattccgcctccacataaccgcgctccccatcattgctgagcacgcccgaaataagatctggatcaagccgaacggcgtcatgcccttcctctacggttcgaacgtagccaaggcccacgtcgcaaagctaccggacgagatggctgaacacagcggagttattgtttgcacgcaggatgatgttcctctgggttttgggattacggcaaggagtacggcggaggcaaggcggttggaccccacgggtattgtttgcttccggcaggcagattgcggagagtacctgcgcgatgaggatactctgtttgcttcagggtaa

SEQ ID NO: 7085 - protein, 188 aa, Aspergillus nidulans FGSC A4
MRPLTEEETQTLFKKLAEYCGSGLKELIKPLDSSPNADRYVFRLSGNRVYYSLLSIANAATAFPRDQLLSLGICMGKFTKTGKFRLHITALPIIAEHARNKIWIKPNGVMPFLYGSNVAKAHVAKLPDEMAEHSGVIVCTQDDVPLGFGITARSTAEARRLDPTGIVCFRQADCGEYLRDEDTLFASG

SEQ ID NO: 7086 - DNA, 543 bp, Gallus gallus
  CDS (1)..(543)
atgcggccgctgacggaggcggagacgcgcgcggtgttcgagaagctcgggagatacattggcgagaacatccagctgctggtggaccggcccgatggcacctactgcttccgcctgcaccgtgaccgcgtgtactatgtgagcgagaagctgctgaaaggtgctgcgagcatcccgcgggacagcctggtggcactgggcacctgctttggcaagttcaccaagacacagaagttccggctcagtgtcactgccctggacttccttgcaccctatgccaagtacaaggtgtgggtgaagccaggctcagagcagtccttcctctacggcaaccatgtgctgaagtccggcctgggccgcatcacagagaacacggcacagtaccaaggcgtggtggtgtactccatggctgacgtcccgctgggatttggagtagctgcaaaatccacccaggactgccggaaggtggaccccatggcaatcgtggtgtttcaccaggcagatgttggggagtacgtgcgcaatgaggacacactgacttag

SEQ ID NO: 7087 - protein, 180 aa, Gallus gallus
MRPLTEAETRAVFEKLGRYIGENIQLLVDRPDGTYCFRLHRDRVYYVSEKLLKGAASIPRDSLVALGTCFGKFTKTQKFRLSVTALDFLAPYAKYKVWVKPGSEQSFLYGNHVLKSGLGRITENTAQYQGVVVYSMADVPLGFGVAAKSTQDCRKVDPMAIVVFHQADVGEYVRNEDTLT

SEQ ID NO: 7088 - DNA, 546 bp, Candida glabrata CBS138
  CDS (1)..(546)
atgagacagctaactgaggaagaaactaaggttgtttttgagaaactagcgggttacattggtagaaacatagcctaccttgtggacaacaaggaggtgccccatgtgttccgtttgcagaaggacagagtttactacgttccagaatatattgccaagctagctacaagtgtagctagacagaacctaatgtctgtgggtatatgtctcgggaagtttacaaagactggtaaattcagactgcatatcactgctctgtcagtattggccaagcacgccaagtacaagatatggattaagccaaatggtgaaatgccttttctatatggtaaccatgtgttgaaagcacatgttggtaagatgactgacgatattccagaacatgctggtctgatagtgttctccatgaacgatatgccacttgggtttggtgttagtgccaagagtacattagagtctaaaaacttgcaaccaaccgccatcgttgcattcagacaagccgatatcggtgaatacttgagagatgaagatactttgttcacttga

SEQ ID NO: 7089 - protein, 181 aa, Candida glabrata CBS138
MRQLTEEETKVVFEKLAGYIGRNIAYLVDNKEVPHVFRLQKDRVYYVPEYIAKLATSVARQNLMSVGICLGKFTKTGKFRLHITALSVLAKHAKYKIWIKPNGEMPFLYGNHVLKAHVGKMTDDIPEHAGLIVFSMNDMPLGFGVSAKSTLESKNLQPTAIVAFRQADIGEYLRDEDTLFT

SEQ ID NO: 7090 - DNA, 546 bp, Kluyveromyces lactis NRRL Y-1140
  CDS (1)..(546)
atgagacaattgacagaggaagagacgaaagtaatcttcgagaagctagcagggtacattggaaggaatatagtgtacttggtggataataaagatcaacctcatgttttccgactacagaaggatagagtgtactatgtcccagagcacattgccaatttagctacttcagttgctagaccgaacctgatgtcattgggtctctgcatggggaagtttaccaagactgggaaatttagattgcatatcacatctttgtcagtacttgcgcaatacgctaagtacaaagtgtggatcaaacctaatggtgagatgccattcctatacggtaaccacgttttgaaggcacacgttggtaagatgtccgatgatattccagagcatgcaggtgtaatcgtattttcgatgcatgatgtgccattaggattcggtgtgagtgctaagagcacttctgagtccagagatcttcaaccaaccagtattgtcgcattcagacaagcagatattggtgagtacttgagagatgaagatacattgtttacttag

SEQ ID NO: 7091 - protein, 181 aa, Kluyveromyces lactis NRRL Y-1140
MRQLTEEETKVIFEKLAGYIGRNIVYLVDNKDQPHVFRLQKDRVYYVPEHIANLATSVARPNLMSLGLCMGKFTKTGKFRLHITSLSVLAQYAKYKVWIKPNGEMPFLYGNHVLKAHVGKMSDDIPEHAGVIVFSMHDVPLGFGVSAKSTSESRDLQPTSIVAFRQADIGEYLRDEDTLFT

SEQ ID NO: 7092 - DNA, 546 bp, Debaryomyces hansenii CBS767
  CDS (1)..(546)
atgagatccttaacagaagaagaaacaaagattgtgttcgagaagttggcgaactatattggtagaaatatttcgtttttaattgacaatccaacgaaccctcatgttttccgtttgcagaaagatagagtatactatgtatcagaacaaatagcaaattttgctacttcagtgtcaagacaccagttaatgtcgatcggtacttgttttgggaagtttaccaagactgggaagtttagattacatatcactgctttaccatacttagcacaatacgcaaagtttaaggtctggattaagaccaacggtgagatgcctttcttgtacggtaaccatgtattgaaggcccatattggtagaatgtcagacgatattccagaacatgcgggtgtcatagtttactcgatgaacgatgttccgttagggtttggggtaagtgctaagtcgactaatgaagctagggcattacagccaactggtattgttgcattcagacaaggagatattggtgaatatttgagagaagaagatacgttattcgcttaa

SEQ ID NO: 7093 - protein, 181 aa, Debaryomyces hansenii CBS767
MRSLTEEETKIVFEKLANYIGRNISFLIDNPTNPHVFRLQKDRVYYVSEQIANFATSVSRHQLMSIGTCFGKFTKTGKFRLHITALPYLAQYAKFKVWIKTNGEMPFLYGNHVLKAHIGRMSDDIPEHAGVIVYSMNDVPLGFGVSAKSTNEARALQPTGIVAFRQGDIGEYLREEDTLFA

SEQ ID NO: 7094 - DNA, 543 bp, Yarrowia lipolytica CLIB99
  CDS (1)..(543)
atgagacctctgaccgaagaagaaacgaaaaccgtgttcgagaagctcgccaactacgttggacgaaacatctcgcacttcatcaataacgaagaccctcacgtgttccggctccagaaggaccgagtctactacgttgaggagaagattgccaagtatgccacctgtgtgtctcgagcccagctcttctccgttggcacctgtctcggcaagttcaccaagaccggcaagttccgacttcatatcaccgctcttcctctcctcgctgcacatgctcgacacaagatctggatcaagcctaacggagagatgcccttcctctatggtaaccacgttctcaaggcccacatcggtaagatgagcgacgacattcccgagcatgccggagtcattgtctactccatgagcgattctcctctgggctttggcgtcagtgcaaagtcttctctggaggtccgacgtctggaccccactggtatggttgctttccgacagggagatgtcggcgagtacctgcgagaggaggacactcttttcgcctaa

SEQ ID NO: 7095 - protein, 180 aa, Yarrowia lipolytica CLIB99
MRPLTEEETKTVFEKLANYVGRNISHFINNEDPHVFRLQKDRVYYVEEKIAKYATCVSRAQLFSVGTCLGKFTKTGKFRLHITALPLLAAHARHKIWIKPNGEMPFLYGNHVLKAHIGKMSDDIPEHAGVIVYSMSDSPLGFGVSAKSSLEVRRLDPTGMVAFRQGDVGEYLREEDTLFA

SEQ ID NO: 7096 - DNA, 567 bp, Oryza sativa (japonica cultivar-group)
  CDS (1)..(567)
atgagggcgctcgacgagaaggagacgaagatggtgttcgagaagctgttcaagttcacggggccgaacctgaagcacctcctggagcggccggcggtggaggggcccgacccgcaggccgggcgctactgcctccgcctccacaagaaccgcgtctactacgcctccgaggcgctcgtccgccgcgccaccgccgtcgcccgcccgcgcctcgccggggtcggcacgcccatcggcaagttcacccacggcggcgcgttccacctcaccgtccacgccctcgacctcctcgccgcccacgcccgccgccgcgtctggctcaagcccgacaccgagcgctccttcctcttcggcaactccgtgcccaagtcctccctcgcccgcatcacagagaacaccaaggccaacgacggcgtcgtcgtcatgtccatggccgacgtcccgctcggcttcggcatcgccgccaggtcggcgcaggactgcaggaaggccgacaccaacgccgtcgttgtgctgcaccagtctgacgcaggcgagtacctccgccgggaggaggagctcatgtga

SEQ ID NO: 7097 - protein, 188 aa, Oryza sativa (japonica cultivar-group)
MRALDEKETKMVFEKLFKFTGPNLKHLLERPAVEGPDPQAGRYCLRLHKNRVYYASEALVRRATAVARPRLAGVGTPIGKFTHGGAFHLTVHALDLLAAHARRRVWLKPDTERSFLFGNSVPKSSLARITENTKANDGVVVMSMADVPLGFGIAARSAQDCRKADTNAVVVLHQSDAGEYLRREEELM

SEQ ID NO: 7098 - DNA, 501 bp, Pan troglodytes
  CDS (1)..(501)
atgcggcctttgactgaagaggagacccgtgtcatgtttgagaagatagcgaaatacattggggagaatcttcaactgctggtggaccggcccgatggcacctactgtttccgtctgcacaacgaccgggtgtactatgtgagtgagaagattatgaagctggccgccaatatttccggggacaagctggtgtcgctggggacctgctttggaaaattcactaaaacccacaagtttcggttgcacgtcacagctctggattaccttgcaccttatgccaagtataaagtttggataaagcctggtgcagagcagtccttcctgtatgggaaccatgtgttgaaatctggtctgggtcgaatcactgaaaatacttctcagtaccagggcgtggtggtgtactccatggcagactgcagaaaagtagaccccatggcgattgtggtatttcatcaagcagacattggggaatatgtgcggcatgaagagacgttgacttaa

SEQ ID NO: 7099 - protein, 166 aa, Pan troglodytes
MRPLTEEETRVMFEKIAKYIGENLQLLVDRPDGTYCFRLHNDRVYYVSEKIMKLAANISGDKLVSLGTCFGKFTKTHKFRLHVTALDYLAPYAKYKVWIKPGAEQSFLYGNHVLKSGLGRITENTSQYQGVVVYSMADCRKVDPMAIVVFHQADIGEYVRHEETLT

SEQ ID NO: 7100 - DNA, 432 bp, Pan troglodytes
  CDS (1)..(432)
atgcggcctttgactgaagaggagacccgtgtcatgtttgagaagattgtgaagtacatcagggagaatcttcagctgctgctggaccggcccgaccgcacctactgtttctggctgcacaacgaccgggtggactatgtgagtgagaagattgtgaagctggatgccaatatctccggggacaagctggtgtcactggggacctgcttcggaaaagtcactaagacccacaagtttcgtctgggtcgaatcaccaaaaatagttctcagtaccagggagtggtggtgtactccatggcagacatccctttgggttttggggtggcagcaaaatctacacaagactgcagaaaagtagaccccatggcgattgtggtacttcatcaagcagacattggggaatatgcacagcatgaagagacgttgacttaa

SEQ ID NO: 7101 - protein, 143 aa, Pan troglodytes
MRPLTEEETRVMFEKIVKYIRENLQLLLDRPDRTYCFWLHNDRVDYVSEKIVKLDANISGDKLVSLGTCFGKVTKTHKFRLGRITKNSSQYQGVVVYSMADIPLGFGVAAKSTQDCRKVDPMAIVVLHQADIGEYAQHEETLT

SEQ ID NO: 7102 - DNA, 543 bp, Canis familiaris
  CDS (1)..(543)
atgcggcctctgactgaagaggagacccgcgtgatgtttgagaagatggcgaaatacatcggcgagaacctccagctgctggtggacaggccggacggcacctactgtttcaggctgcacaacgaccgggtgtactacgtgagtgagaagatcctgaagttggccgccaacatctccggggacaagctggtgtcgctggggacctgcttcgggaaattcaccaagagtcacagattccggttgcacatcacagccctggattacctcgcaccctatgccaagtataaagtgtggataaagcctggagcagagcagtctttcctgtatgggaaccatgtgttgaaatcgggactgggtcgaatcactgaaaatacttgccagtaccagggagtggtggtgtactccatggcagacgtccctttgggttttggggtggcagcaaagtctacacaagactgcaggaaagtagaccccatggcgattgtggtatttcatcaagcagacattggggaatatgtgcggcatgaagagacattgacttaa

SEQ ID NO: 7103 - protein, 180 aa, Canis familiaris
MRPLTEEETRVMFEKMAKYIGENLQLLVDRPDGTYCFRLHNDRVYYVSEKILKLAANISGDKLVSLGTCFGKFTKSHRFRLHITALDYLAPYAKYKVWIKPGAEQSFLYGNHVLKSGLGRITENTCQYQGVVVYSMADVPLGFGVAAKSTQDCRKVDPMAIVVFHQADIGEYVRHEETLT

SEQ ID NO: 7104 - DNA, 546 bp, Cryptococcus neoformans var. neoformans JEC21
  CDS (1)..(546)
atgaggcccttaacagaggaagagacaaaggctgtgttcgaaaagctcgcaaactacatcggaaagaacctcgttcacctcatcgacagggatgaggatgacgagtactgcttccgtctccacaaagacagagtgtactatctcccccttcccatgctccacttggccacctctgtcgcccgacctaatctcgtttctctcggtacatgtttcggtaaattctcaaaaactggcaaattcaagcttggtataatgtgtttggactatctcgccaagtacgcaaagtacaaggtctggattaagccttctggagaacttcctttcctctacggtaaccacgtcgccaaagcgcatttgggaaggataacggaggatacacccgaacatcagggtgtggtggtgtacaacatgtcggatgtgcctttaggattcggagtaacagcccgctcaacactcgatacacgtaaactcgatccgacgggtattatcgtcttccaccaagcggacgttggagagttcttgcgtgatgaggataccatgttctaa

SEQ ID NO: 7105 - protein, 181 aa, Cryptococcus neoformans var. neoformans JEC21
MRPLTEEETKAVFEKLANYIGKNLVHLIDRDEDDEYCFRLHKDRVYYLPLPMLHLATSVARPNLVSLGTCFGKFSKTGKFKLGIMCLDYLAKYAKYKVWIKPSGELPFLYGNHVAKAHLGRITEDTPEHQGVVVYNMSDVPLGFGVTARSTLDTRKLDPTGIIVFHQADVGEFLRDEDTMF

SEQ ID NO: 7106 - DNA, 510 bp, Bos taurus
  CDS (1)..(510)
atgtttgagaagatagcaaaatacatcggggagaatcttcagctgctggtcgacaggcccgacggcacctactgtttcaggctgcacaacgaccgggtgtactacgtgagtgagaagattttgaagttggccgccaatatctccggtgacaagctggtgtcgttggggacgtgtttcggaaaattcaccaagacccataagtttcggttgcacatcacggctctggattacctagcaccctatgccaagtataaagtgtggataaaacctggagcagagcagtcctttctgtatgggaaccatgtgctgaaatctggacttgggcgaatcactgaaaacacttctcagtaccagggagtcgtggtgtactccatggcagatgtccctctgggttttggggtggcagcaaagtccacacaagactgcaggaaagtagaccccatggcgattgtggtatttcatcaagcagacattggggaatatgtgcgacatgaagagacattgacttaa

SEQ ID NO: 7107 - protein, 169 aa, Bos taurus
MFEKIAKYIGENLQLLVDRPDGTYCFRLHNDRVYYVSEKILKLAANISGDKLVSLGTCFGKFTKTHKFRLHITALDYLAPYAKYKVWIKPGAEQSFLYGNHVLKSGLGRITENTSQYQGVVVYSMADVPLGFGVAAKSTQDCRKVDPMAIVVFHQADIGEYVRHEETLT

SEQ ID NO: 7108 - DNA, 555 bp, Cryptosporidium parvum
  CDS (1)..(555)
atgaaggtgaaaatgagaccattaacagaagaagaaacaaagatattgtttgaaaagctaagtaattatttgggcaataacttgttgtcattattagagagggaagatgaaagttatgtttttagattacataagggaaatgtattctatatgagtgaaactttagcaaaagcagcaagtattgttccaaaaaaaagtttattaagtatgggaacatgcttaggcaaattttctaagaataataaattcagattaggaataacttctttacagtatatagcaagactgactccaaataaggtatgggtaaaaccaggaggtgaacagagctatatttatggaaatcatgtaatcaaaaggcatattagtagaatgactgatggtctaagtaataacgttggagttgtagtatattcaatggatgagctaccattgggatttggtgtcttagcaaagagttctgctgacatgaagaatgctgatccagaaactattgcggtttatcatcaaactgatgtgggtgaatacttgagagaagaagctgatttattgtaa

SEQ ID NO: 7109 - protein, 184 aa, Cryptosporidium parvum
MKVKMRPLTEEETKILFEKLSNYLGNNLLSLLEREDESYVFRLHKGNVFYMSETLAKAASIVPKKSLLSMGTCLGKFSKNNKFRLGITSLQYIARLTPNKVWVKPGGEQSYIYGNHVIKRHISRMTDGLSNNVGVVVYSMDELPLGFGVLAKSSADMKNADPETIAVYHQTDVGEYLREEADLL

SEQ ID NO: 7110 - DNA, 690 bp, Dictyostelium discoideum
  CDS (1)..(690)
atgatggtaatgataaaacatgtaattttaccatcagaaatatcatcccttatcccaagagatgtgttattaactgaagatgaatgtagaaaattaggaattagacaatctgatggttgggaacattatgcaaatcataaaccagaaccacatatccttttatttagaagaccacacagcggtattccaaatgatgttgattattttattggtaaaaatgttacattattaatacaaagaaaagatgaaccatattgttttagaattcaaaagaataaagtatattatgttagtgaagaattaatgaaaagatcacaaaatataccaagagaaggattatgtagtttaggaacatgttttggtcgttttacaaaaacaggaaaatttaaattaaatatcacttgtttagattacttagcacaatatgcaaaatataaagtttgggttaaaccatcatcagaaatgtcttggatgtatggtaataatttattaaaagctggtttaggtagaattacagaagatacacctgcaaatcaaggtgttgttttattctcaatgaatgatgtaccaattggtttcggtgttacctcaaaatcaactcatgaatgtagaaaattagatccacaagctttagtagtttatcattatggtgatgttggtgaatatttgagagatgaagatattatgtaa

SEQ ID NO: 7111 - protein, 229 aa, Dictyostelium discoideum
MMVMIKHVILPSEISSLIPRDVLLTEDECRKLGIRQSDGWEHYANHKPEPHILLFRRPHSGIPNDVDYFIGKNVTLLIQRKDEPYCFRIQKNKVYYVSEELMKRSQNIPREGLCSLGTCFGRFTKTGKFKLNITCLDYLAQYAKYKVWVKPSSEMSWMYGNNLLKAGLGRITEDTPANQGVVLFSMNDVPIGFGVTSKSTHECRKLDPQALVVYHYGDVGEYLRDEDIM

SEQ ID NO: 7112 - DNA, 552 bp, Entamoeba histolytica HM-1:IMSS
  CDS (1)..(552)
atgagacctttaactgatgaagaaacaaaatcattttttgagaaactagcgaagtacattggcagaaacattcgatttttaatagacaacgaaaatgaagagtattgttttagattacaaaaggatagagtttattatgtgagacttagtattgcagaacaagctaccacaattggaagagagaatttattatcacttggcacatgttttgggaaattcactaaaacagggaaatttaaacttcacataactgcattaccatatttagcacaatattgttcatgtaaaatatgggtaaaaccagaagcagaaacatcatttttatatggaaatcatttagtcaaaaacggaataagtaaaataacagacaacatggcaagaaacataggatgtgttatgtttaatgaaaatgatattgcaattggctttggaacaacagcatgttcttcagttgaatattctcgattaagtgcaacagggattgtctgttataatcaaggagatttaggagaatatttaagagaagaagatacaatgatggttcagaattaa

SEQ ID NO: 7113 - protein, 183 aa, Entamoeba histolytica HM-1:IMSS
MRPLTDEETKSFFEKLAKYIGRNIRFLIDNENEEYCFRLQKDRVYYVRLSIAEQATTIGRENLLSLGTCFGKFTKTGKFKLHITALPYLAQYCSCKIWVKPEAETSFLYGNHLVKNGISKITDNMARNIGCVMFNENDIAIGFGTTACSSVEYSRLSATGIVCYNQGDLGEYLREEDTMMVQN

SEQ ID NO: 7114 - DNA, 552 bp, Entamoeba histolytica HM-1:IMSS
  CDS (1)..(552)
atgagacctttaactgatgaagaaacaaaatcattttttgagaaactagcgaagtacattggcagaaacattcgatttttaatagacaacgaaaatgaagagtattgttttagattacaaaaggatagagtttattatgtgagacttagtattgcagaacaagctaccacaattggaagagagaatttattatcacttggcacatgttttgggaaattcactaaaacagggaaatttaaacttcaaataactgcattaccatatttagcacaatattgttcatgtaaaatatgggtaaaaccagaagcagaaacatcatttttatatggaaatcatttagtcaaaaacggaataagtaaaataacagacaacatggcaagaaacataggatgtgttatgtttaatgaaaatgatattgcaattggctttggaacaacagcatgttcttcagttgaatattctcgattaagtgcaacagggattgtctgttataatcaaggagatttaggagaatatttaagagaagaagatacaatgatggttcagaattaa

SEQ ID NO: 7115 - protein, 183 aa, Entamoeba histolytica HM-1:IMSS
MRPLTDEETKSFFEKLAKYIGRNIRFLIDNENEEYCFRLQKDRVYYVRLSIAEQATTIGRENLLSLGTCFGKFTKTGKFKLQITALPYLAQYCSCKIWVKPEAETSFLYGNHLVKNGISKITDNMARNIGCVMFNENDIAIGFGTTACSSVEYSRLSATGIVCYNQGDLGEYLREEDTMMVQN

SEQ ID NO: 7116 - DNA, 468 bp, Entamoeba histolytica HM-1:IMSS
  CDS (1)..(468)
atgagacctttaactgatgaagaaacaaaatcattttttgagaaactagcgaagtacattggcagaaacattcgatttttaatagacaacgaaaatgaagagtattgttttagattacaaaaggatagagtttattatgtgagacttagtattgcagaacaagctaccacaattggaagagagaatttattatcacttggcacatgttttgggaaattcactaaaacagggaaatttaaacttcacataactgcattaccatatttagcacaatattgttcatgtaaaatatgggtaaaaccagaagcagaaacatcatttttatatggaaatcatttagtcaaaaacggaataagtaaaataacagacaacatggcaagaaacataggatgtgttatgtttaatgaaaatgatattgcaattggctttggaacaacagcatgttttcagttgaatattctcgattaa

SEQ ID NO: 7117 - protein, 155 aa, Entamoeba histolytica HM-1:IMSS
MRPLTDEETKSFFEKLAKYIGRNIRFLIDNENEEYCFRLQKDRVYYVRLSIAEQATTIGRENLLSLGTCFGKFTKTGKFKLHITALPYLAQYCSCKIWVKPEAETSFLYGNHLVKNGISKITDNMARNIGCVMFNENDIAIGFGTTACFQLNILD

SEQ ID NO: 7118 - DNA, 543 bp, Cryptosporidium hominis
  CDS (1)..(543)
atgagaccattaacagaagaagaaacaaagatattatttgaaaagctaagtaattatttgggaaataacttgttgtcattattagagagagaagatgaaagttatgttttcagattacataaggggaatgtattctatatgagtgaaactttagcaaaagcagcaagtattgttccaaaaaaaagtttattaagtatgggaacatgcttaggcaaattttctaagaataataaattcagattaggaataacttctttacagtacatagcaagactgactccaaataaggtgtgggtaaaaccaggaggtgaacagagctatatttatggaaatcatgtaatcaaaagacatattagtagaatgactgatggtctaagtaataacgtcggagttgtagtatattcaatggatgagctaccattgggatttggtgtcttagcaaagagttctgctgacatgaagaatgctgatccagaaactattgcggtttatcatcaaactgatgtgggtgaatacttgagagaagaagctgatttgttgtaa

SEQ ID NO: 7119 - protein, 180 aa, Cryptosporidium hominis
MRPLTEEETKILFEKLSNYLGNNLLSLLEREDESYVFRLHKGNVFYMSETLAKAASIVPKKSLLSMGTCLGKFSKNNKFRLGITSLQYIARLTPNKVWVKPGGEQSYIYGNHVIKRHISRMTDGLSNNVGVVVYSMDELPLGFGVLAKSSADMKNADPETIAVYHQTDVGEYLREEADLL

SEQ ID NO: 7120 - DNA, 504 bp, Plasmodium berghei
  CDS (1)..(504)
atgtttattttttttcttagtgttggaaataacttgctgagtatgttgtcttacaataatgaggaatatgttttgagacttcatagatttaatgtacattttgttagagcggatatagccaaacaagcagaatcgattaataaaaattcactagtttcattaggaatttgtattggaaaaattacaaaagcaaataattttttccttaaaattacatccctatctttgataaacgagttttgcattcataaaatatggctaaaggagtcaggagaaaaaaattttttattcggaaataatgtcttaaagagtcatttattaaaaatcagtgacaacataaggaaaggagacggtgtaattgtcttgtcaatggatgacaatccaataggttttggtatatctataagaaatacccaagatataaaattgttaaatattacggatattgtgttaattcatcagagtgatgttggagaatatttaagaaatgaaacagctttataa

SEQ ID NO: 7121 - protein, 167 aa, Plasmodium berghei
MFIFFLSVGNNLLSMLSYNNEEYVLRLHRFNVHFVRADIAKQAESINKNSLVSLGICIGKITKANNFFLKITSLSLINEFCIHKIWLKESGEKNFLFGNNVLKSHLLKISDNIRKGDGVIVLSMDDNPIGFGISIRNTQDIKLLNITDIVLIHQSDVGEYLRNETAL

SEQ ID NO: 7122 - DNA, 789 bp, Candida albicans SC5314
  CDS (1)..(789): transl_table=12
atgttggttcttttttttttttttttttttttcacgatgggctgtctctctttgctttggttggttgggactgaaaatttatcacccatcaccgctaccacccacaaaaaaaaaaaaatttccactcatcgccatcaaataaaaaacctcacttcacacactcaaatattatcacttaacgtcatccctcctctcctcccctctcccttatattttcatactaattctatctatccatttattatgagaccacttacagaagaagaaaccaaagtcgtatttgaaaaactagccaattatataggtagaaacatttctttccttatagataatccagaaaatcctcatgttttccgacttcaaaaagatcgagtttattatgttcaggaatcaattgctaaatttgctactagtgtatcacgtcaacaattaatgtcattaggtacatgttttgggaaattcactaaaacggggaaattcagattacatattactagtttaccttatttggctcaatatgctaaattcaaaatttggattaaacaaaatggtgaaatgccatttttatatggtaatcatgtattaaaagctcatattgggagaatgtccgatgatattccggaacatgctggggttattatatattcaatgaatgatatacctttaggatttggtgctagtgctaaaagtactgctgaagcaagaaatttacctccaactggtatcgttgcatttagacaaggtgatataggtgaatatttaagagaagaagatacattatttacttaa

SEQ ID NO: 7123 - protein, 262 aa, Candida albicans SC5314
MLVLFFFFFFFTMGCLSLLWLVGTENLSPITATTHKKKKISTHRHQIKNLTSHTQILSLNVIPPLLPSPLYFHTNSIYPFIMRPLTEEETKVVFEKLANYIGRNISFLIDNPENPHVFRLQKDRVYYVQESIAKFATSVSRQQLMSLGTCFGKFTKTGKFRLHITSLPYLAQYAKFKIWIKQNGEMPFLYGNHVLKAHIGRMSDDIPEHAGVIIYSMNDIPLGFGASAKSTAEARNLPPTGIVAFRQGDIGEYLREEDTLFT

SEQ ID NO: 7124 - DNA, 558 bp, Aspergillus fumigatus Af293
  CDS (1)..(558)
atgcgtcaactcacggagcaggagttgcagacgttgcttgccaagttggcgggctataccggacgctcactgaacaacctcatcgtgccccagtccgattccgaggacgaccgccatgtcttccgtctgcagggaaatcgagtgtactacgtgaagaagtcactggcagatctatcgacaagtttccctcgggacacccttctttctctcggaacttgtattggcaagtttaccaagactggaaagtttagaattcacatcacagcgctcgacgtaattgctcctcatgcgagatacaaggtatggatcaaggacaatggtatcatgccttatctctacgggtcgaatgttgtgaaagcgcacgtcggaagatggagtgaggatatccccgagcatacaggagtcttggtgtacgactctaacgacacacctttgggtttcggagttactgcccgatccaccgctgagatccgcaagctggatcccactgcgatcgccgtgtttcggcaagcggatataggagaatacctgagagaggtacgtcgctctatctcttga

SEQ ID NO: 7125 - protein, 185 aa, Aspergillus fumigatus Af293
MRQLTEQELQTLLAKLAGYTGRSLNNLIVPQSDSEDDRHVFRLQGNRVYYVKKSLADLSTSFPRDTLLSLGTCIGKFTKTGKFRIHITALDVIAPHARYKVWIKDNGIMPYLYGSNVVKAHVGRWSEDIPEHTGVLVYDSNDTPLGFGVTARSTAEIRKLDPTAIAVFRQADIGEYLREVRRSIS

SEQ ID NO: 7126 - DNA, 543 bp, Ustilago maydis 521
  CDS (1)..(543)
atgcgacctctcacggaagaagagacaaagacgctctttgagaagctcgccaactatgtgggcaaaaacctagtcaacctcatcgaccgacccgatgaacctcacgtgttccgcttgcaccgcgatcgtgtctactacgtttcggaatcgtcgatgcgactcgccatctcaatcgcacgtcccaacctcatgtctttgggtacctgtttcggcaagtttagcaagacaggcaagttccggctgcacgtcacggcgctcgactacctggcacaatatgcaaagtacaaggtgtggatcaaacctaatggcgaattgccgttcctgtacggcaatcatgtggtcaaggcgcacttggggaggatcacagatgatacaccggaacacgcgggggtggtggtgctgagtatgagcaatacccccttgggattcggtgtgacggcgagaagtacggtggatacgagaaagcaggatcccaccagtatcatcgttttccaccaggcagatgtgggagagtacttgcgcgacgaagataccctcttctga

SEQ ID NO: 7127 - protein, 180 aa, Ustilago maydis 521
MRPLTEEETKTLFEKLANYVGKNLVNLIDRPDEPHVFRLHRDRVYYVSESSMRLAISIARPNLMSLGTCFGKFSKTGKFRLHVTALDYLAQYAKYKVWIKPNGELPFLYGNHVVKAHLGRITDDTPEHAGVVVLSMSNTPLGFGVTARSTVDTRKQDPTSIIVFHQADVGEYLRDEDTLF

SEQ ID NO: 7128 - DNA, 537 bp, Theileria parva
  CDS (1)..(537)
atgagacctttaagtgaagacgaagttcaaattgttttaaagaaactagcatcatatattggagataaggttcttcaaatggttgaaaataatcaatttggacaacattacttccgcctacacaatgaaagagtttattacataagtgaaaatatacttaaatatgttggctccatcagtagtaaaaaattgatatcggctggagtttgtttgggaaagttcactaaatcgaagcagtttagattacacattacagcgctagagtacctctcatactattctaagaataaagtatggctaaagatggatcaaccttttctatatggtggaaatgtactaaagaaacatgtcgatcaaattagtgaaggaattgaacagaacgcaggagttgttgttatgtcgaaaaacattcctcttgggtttggaataacctcaaaatccacagagaatctgaggaactcactcccagatgatatcgcagttataaaccaggccgacatcggacattatttacgtcatgaagaggaaataatttaa

SEQ ID NO: 7129 - protein, 178 aa, Theileria parva
MRPLSEDEVQIVLKKLASYIGDKVLQMVENNQFGQHYFRLHNERVYYISENILKYVGSISSKKLISAGVCLGKFTKSKQFRLHITALEYLSYYSKNKVWLKMDQPFLYGGNVLKKHVDQISEGIEQNAGVVVMSKNIPLGFGITSKSTENLRNSLPDDIAVINQADIGHYLRHEEEII

SEQ ID NO: 7130 - DNA, 696 bp, Giardia lamblia ATCC 50803
  CDS (1)..(696)
atgagatgtaggcatcctctcacaaccatttatgcatggtgcatatacctttcaaaatcattacatattaccggtgatgcttggaaggctcagacttatggtttcgtggcctccagcagatccagtaaatcaagattaacaattgaattaaaaatgcgtgagctgaagccagaggaggtggaaaccgtctttggcaagctggctaagtacataggaaagaacgtcgagaaactcattgacagaaatgacggaaagtacgtgttcagagttctgaaagatcgagtttattacatgtcacagcagctcgagaaaatggcttcgaacatcccccgaaagcagctcattggctctggcctgcttatcggaaaattcacacaccataagaagtttcacattaagatcacggcacttcccctactagcggtctttgcaccctataggattcgcataacacccgcttctgagctgtcatttctttataaaaatgatgtgatgaagtcccacatcacgcacatgagtgaaggaattccagacaacgctggcgtagtaattgtcagcgccgatgatcaacccgttgggttcggagtcacgacaaaatctgggaacgaagcactgaactctgatcctgccagtaaaattgtcattcaccaggcagacgtaggggaattcttgcgtgaccaggacacgatgttttaa

SEQ ID NO: 7131 - protein, 231 aa, Giardia lamblia ATCC 50803
MRCRHPLTTIYAWCIYLSKSLHITGDAWKAQTYGFVASSRSSKSRLTIELKMRELKPEEVETVFGKLAKYIGKNVEKLIDRNDGKYVFRVLKDRVYYMSQQLEKMASNIPRKQLIGSGLLIGKFTHHKKFHIKITALPLLAVFAPYRIRITPASELSFLYKNDVMKSHITHMSEGIPDNAGVVIVSADDQPVGFGVTTKSGNEALNSDPASKIVIHQADVGEFLRDQDTMF

SEQ ID NO: 7132 - DNA, 537 bp, Strongylocentrotus purpuratus
  CDS (1)..(537)
atgcgtcctttaacggaagaggagaccaggacgttgtttgaaaaactgtcaaaatacattggtgaaaatatcaagcttttaattgacagggcagatggaatgtactgcttcagatatcacagagatagggtgttttatgtcagcattggtgaaaatattaagcttttaattgacagggcagatggaatgtactgcttcagatatcacagagatagggtgttttatgtcagtgaggaaatcatgaagcgagctgctagtgttgtcagggataaccttatcagctttgggacgtgctttggcaaattctccaagaccaagaaatttaggcttcacatcacagcgctggattatttagcgccatatgccaagatgagcgattggcttgtaacagtcatagggttcttgactgacttaaaaggctttggtgttgcagcgaaatcaactcaggaatgcagacacacggatcccatgtccatcatagtcttccatcaagctgatataggggaatacctcaggaacgaggacacactcttgtag

SEQ ID NO: 7133 - protein, 178 aa, Strongylocentrotus purpuratus
MRPLTEEETRTLFEKLSKYIGENIKLLIDRADGMYCFRYHRDRVFYVSIGENIKLLIDRADGMYCFRYHRDRVFYVSEEIMKRAASVVRDNLISFGTCFGKFSKTKKFRLHITALDYLAPYAKMSDWLVTVIGFLTDLKGFGVAAKSTQECRHTDPMSIIVFHQADIGEYLRNEDTLL

SEQ ID NO: 7134 - DNA, 618 bp, Trypanosoma cruzi
  CDS (1)..(618)
atgcatgcccgccaccttgacgcacgcacatacatgtacacatacgcgtgtaggaagaggtggtttacaatgcggtcactaacggaggaggagacgaagaggctgttcgacaaactagcgcagtacattgggcccaatacaacgcacctgctagagcgcaagggcgaggaagaggaacatgtgtttcggctgcacaagaaccgcatatggtacatgccgctgcgccttgccaaacttgccagttgcgtggccaagtcgaatctgatgggtattggtgtcctttttgcgaaggtgacacacaacggacacatccgcattcaagtaacggcgctggattacatcgcacagtactccctctttaaggtttgggtgaagccgaaccaggagcagaagtttctttacggcggtcacgtcacacgcgccggtcttggtcgcatcaccgaatcgacgccaaaatatcagaaggtggcagttttctccatgggggatgtgccgttggggttcggtgtggccgcgcttggaacactggagtgcaggaagtgcgaaatgaacagcaccgtgttgtttcatgaggcagatgtgggtgagtacctccgtaacgaggcagggctcacatga

SEQ ID NO: 7135 - protein, 205 aa, Trypanosoma cruzi
MHARHLDARTYMYTYACRKRWFTMRSLTEEETKRLFDKLAQYIGPNTTHLLERKGEEEEHVFRLHKNRIWYMPLRLAKLASCVAKSNLMGIGVLFAKVTHNGHIRIQVTALDYIAQYSLFKVWVKPNQEQKFLYGGHVTRAGLGRITESTPKYQKVAVFSMGDVPLGFGVAALGTLECRKCEMNSTVLFHEADVGEYLRNEAGLT

SEQ ID NO: 7136 - DNA, 549 bp, Trypanosoma cruzi
  CDS (1)..(549)
atgcggtcactaacggaggaagagacgaagaggctgttcgacaaactagcgcagtacattgggcccaatacaacccacctgctagagcgcaagggcgaggaagaggaacatgtgtttcggctgcacaagaaccgcatatggtacatgccgctgcgccttgccaaacttgccagttgcgtggccaagtcgaatctgatgggtattggtgtcctttttgcgaaggtgacacacaacggacacatccgcattcaagtaacggcgctggattacatcgcacagtactccctctttaaggtttgggtgaagccgaaccaggagcagaagtttctttacggcggtcacgtcacacgcgccggtcttggccgcatcacggaatcgacgccaaaatatcagaaggtggcagttttctccatgggggatgtgccgttggggttcggtgtggccgcgcttggaacactggagtgcagaaagtgcgaaatgaacagcaccgtgttgtttcatgaggcagatgtgggtgagtacctccgtaacgaggcagggctcacatga

SEQ ID NO: 7137 - protein, 182 aa, Trypanosoma cruzi
MRSLTEEETKRLFDKLAQYIGPNTTHLLERKGEEEEHVFRLHKNRIWYMPLRLAKLASCVAKSNLMGIGVLFAKVTHNGHIRIQVTALDYIAQYSLFKVWVKPNQEQKFLYGGHVTRAGLGRITESTPKYQKVAVFSMGDVPLGFGVAALGTLECRKCEMNSTVLFHEADVGEYLRNEAGLT

SEQ ID NO: 7138 - DNA, 648 bp, Trypanosoma brucei
  CDS (1)..(648)
atgcgtccgttaacggaggaagagacaaaaaagctgtttgacaagcttgcacaatacattggaccgaacactgcccacctgcttcagcagaagggaaccaaatcggctggtgttgctcctttcaacaatggcaagaccaccggcaataatgggagcaacgatgatgatgatggtgatgacggcgaagaacaaaactcgcagcagacttatgtcttccgtttgcacaagaaccgtatttggtacatgccactgaggctggccaaactcgcaagttgcgtggcgaagtccaacttaatgggaattggtgttctcttcgctaaggtcacgcaccacggtcatgtgcgactgcaggtaacggcgttagaatatattgcacagtactctctctttaaagtgtggttgaaaccaagtcaagagcagaagtttctgtatggtggccacgtcacgcgtgccggtttgggtcgtattacagaagcaacaccgcgacatcaaaaagtggctgtcttttctatgggcgatgtacccctcggttttggtgtggcagcgcttgggacgttggagtgcaggcggtgtgagatgaacagcaccgtattatttcatgaagctgatgttggcgagtacttgcgtaacgaggcacgcttgacgtag

SEQ ID NO: 7139 - protein, 215 aa, Trypanosoma brucei
MRPLTEEETKKLFDKLAQYIGPNTAHLLQQKGTKSAGVAPFNNGKTTGNNGSNDDDDGDDGEEQNSQQTYVFRLHKNRIWYMPLRLAKLASCVAKSNLMGIGVLFAKVTHHGHVRLQVTALEYIAQYSLFKVWLKPSQEQKFLYGGHVTRAGLGRITEATPRHQKVAVFSMGDVPLGFGVAALGTLECRRCEMNSTVLFHEADVGEYLRNEARLT

SEQ ID NO: 7140 - DNA, 1545 bp, Canis familiaris
  CDS (1)..(1545)
atgcctttctctgccccaagcaataatcaagctgcgcgctctgcagcgaagctcagtcttgcagcctcgcgtctcagtcgctgctttgggaggaggcttttcagcttggatacgagcagaccgattgccttcctcgcaaggttcccgcgcggggacgcccacctgaggccggctctggggctgctggtgcggcagcctcgtggggcagcgcccggattcccgggggcgctgcaggcggtgcgcggggactcggctcccgggccgccgccgctgcccagtgccctgcgctggcccaggcggagaaagcagcccgcagccgccgagcgaagagcgcctacgtggaggaggctgcgaacctccagcagaggaggtgttcggatgctgctgatgctgctgatctggagagcaccctttgagaaccacagtcctaaagtagctaaagctattcagaccagcatcatgggcctcacctgggaacttatgtcacatccctctattaagatgtttcataaggctaagtactatggcttatcccgagtatgccttgttgcccaccaacaagggaaatggcactgtcctgatgacacaattatagagcactgcattgaggtactggagacctttgctcctcagagaagtaaaggagaatgtgacccagaatttcagtgtatgagttatgtgaagaccaataggtacacatgcgtgcccaatgcaggtgaaggttctgatgacttaaccattactaccactccagagttcttagattctctggactccaaattatcagaatttcctgatagcctagagtcactgttcaatgcaagtgacaattcttcccttgcaagacctgtaaagaacataacagctctcatcccctccaccataccttctctgatccatattaaggagatgcaagcaatgagaactcctggttctgacagaaaaagaacaagggggcttccttcccctgcggtcgtccaggctgggggcgccggcgtggggagcgaacggaaggccgctagggaggcgggctgtggggttgcccgcgcggcggcgccgacttccgcttccggctgcaacccagcgggaacgccggacggcacctcctgtttcaggctgcacaacgaccgggtgtactacgtgagcgagaagatgctgaagttggccgccaacatctctggggacaagccggtgtcgctggggacctgcttcaggaaattcaccaagagtcacagattccggttacacatcacagctctggattaccccgcaccctgtgccaagtatggagtgtggataaagcctggagcagagcagtctttcctgtatgggaaccatgtgttgaaatcgggactgggtcgaatcactgaaaatacttgccagtaccagggagtggtggtgtactccatggcagacgtccctttgggttttggggtggcagcaaagtctacacaaggctgcgggaaagtagaccccgtggtgattgtggtatttcatcaagcagacattggggaatgtgtgcggcatgaagagacattgacctag

SEQ ID NO: 7141 - protein, 514 aa, Canis familiaris
MPFSAPSNNQAARSAAKLSLAASRLSRCFGRRLFSLDTSRPIAFLARFPRGDAHLRPALGLLVRQPRGAAPGFPGALQAVRGDSAPGPPPLPSALRWPRRRKQPAAAERRAPTWRRLRTSSRGGVRMLLMLLIWRAPFENHSPKVAKAIQTSIMGLTWELMSHPSIKMFHKAKYYGLSRVCLVAHQQGKWHCPDDTIIEHCIEVLETFAPQRSKGECDPEFQCMSYVKTNRYTCVPNAGEGSDDLTITTTPEFLDSLDSKLSEFPDSLESLFNASDNSSLARPVKNITALIPSTIPSLIHIKEMQAMRTPGSDRKRTRGLPSPAVVQAGGAGVGSERKAAREAGCGVARAAAPTSASGCNPAGTPDGTSCFRLHNDRVYYVSEKMLKLAANISGDKPVSLGTCFRKFTKSHRFRLHITALDYPAPCAKYGVWIKPGAEQSFLYGNHVLKSGLGRITENTCQYQGVVVYSMADVPLGFGVAAKSTQGCGKVDPVVIVVFHQADIGECVRHEETLT

SEQ ID NO: 7142 - DNA, 402 bp, Canis familiaris
  CDS (1)..(402)
atgcggcctctgactgaagaggagacccgcgtgatgtttgagaagatggcgaaatacatcggcgagaacctccagctgctggtggacaggccggacggcacctactgtttcaggctgcacaacgaccgggtgtactacgtgagtgagaagatcctgaagttggccgccaacatctccggggacaagctggtgtcgctggggacctgcttcgggaaattcaccaagagtcacagattccggttgcacatcacagccctggattacctcgcaccctatgccaagggttttggggtggcagcaaagtctacacaagactgcaggaaagtagaccccatggcgattgtggtatttcatcaagcagacattggggaatatgtgcggcatgaagagacattgacttaa

SEQ ID NO: 7143 - protein, 133 aa, Canis familiaris
MRPLTEEETRVMFEKMAKYIGENLQLLVDRPDGTYCFRLHNDRVYYVSEKILKLAANISGDKLVSLGTCFGKFTKSHRFRLHITALDYLAPYAKGFGVAAKSTQDCRKVDPMAIVVFHQADIGEYVRHEETLT

SEQ ID NO: 7144 - DNA, 546 bp, Leishmania major
  CDS (1)..(546)
atgaggcctctcacagatgacgagacgaaaaagctctttgacaagcttgcacagtacatcggggccaacacaacgcacttgctagagcgaaaaggcgaggaggagcacgtctttcgcctccacaagaatcgtatatggtacatgcctttgcgtctcgcaaagcttgcgagctgtgtgtccaagacaaatctaatgggtatcggcgttttattcgccaaggttactcacaacggaaacgtacgcattcaggtgacagcgctagagtacatcgcgcagtactcactcttcaagatttgggtaaagccgaaccaagagcagaaattcctgtacggtggaaacgtcagtcgcgcaggccttggccgtatcaccgagtcgacaccgaagtaccaaaaggtcgccgtcttttcaatgggcgatatcccattaggtttcggtgtcgcggcccaaagcacgctggaatgccgaaagtgcgaaatgaactcacaagtgctttttcatgaggccgatgttggtgagtacttgcgtgatgaggctcgcatgacatag

SEQ ID NO: 7145 - protein, 181 aa, Leishmania major
MRPLTDDETKKLFDKLAQYIGANTTHLLERKGEEEHVFRLHKNRIWYMPLRLAKLASCVSKTNLMGIGVLFAKVTHNGNVRIQVTALEYIAQYSLFKIWVKPNQEQKFLYGGNVSRAGLGRITESTPKYQKVAVFSMGDIPLGFGVAAQSTLECRKCEMNSQVLFHEADVGEYLRDEARMT

SEQ ID NO: 7146 - DNA, 543 bp, Tetraodon nigroviridis
  CDS (1)..(543)
atgaggcccttgacagaggaagagacaaaaactatgtttgaaaagctgtcgaaatacatcggggaaaacatcaaacttcttgtggatcgtcctgatggcacatattgttttaggctccataacgaccgggtgtactacatgagtgagagaattttgaaattagctacaaacatcgcccgacagaagctggtctcggttggaacatgttttggaaagttcacaaagaccagcaaattccgcctgcacatcacagctctggactttctagcgccatatgcgaagttcaaggtgtgggtgaaacctggagcggagcagtccttcctctacgggaaccacgtgctgaaatccgggctcgggagaatcacggagaacactgcgcagtaccaaggagttgtggtctactccatggcagacgtgccccttggttttggcgttgcagccaagtccacccaggagtgtcggcgagtggatcccatgtccatcgttgtgttccaccaggccgacgtgggagaatttattcgaaacgaagactcattaacataa

SEQ ID NO: 7147 - protein, 180 aa, Tetraodon nigroviridis
MRPLTEEETKTMFEKLSKYIGENIKLLVDRPDGTYCFRLHNDRVYYMSERILKLATNIARQKLVSVGTCFGKFTKTSKFRLHITALDFLAPYAKFKVWVKPGAEQSFLYGNHVLKSGLGRITENTAQYQGVVVYSMADVPLGFGVAAKSTQECRRVDPMSIVVFHQADVGEFIRNEDSLT

SEQ ID NO: 7148 - DNA, 549 bp, Theileria annulata
  CDS (1)..(549)
atgagacctttaagtgaagatgaagttcagattgttttaaagaaactcgcttcatatattggagataaagtacttcaaatggtcgaaaataacaaatctggacaacattacttccgtttacataatgaaagagtttattacataaggttacaatggaatatatactttctttatgaaaatatacttaaatatgtcggatccataagtagtaaaaaattgatatcggctggagtttgtttgggaaagtttaccaaatcgaaacagttcagattacatattacagcactggaatacctttcatattactcaaagaataaagtttggttaaaaatggatcaaccttttttatatggtggaaatgtactcaagaaacatgtggatcaaattagtgaaggaattgaacagaatgcaggagttgttgttatgtcaaaaaatatacctcttgggtttggaataacctcaaaatccaccgagaatcttagaaactcactcccagacgatatcgcagtaattaatcaggtaatcaatatatctaaaaaattatgttag

SEQ ID NO: 7149 - protein, 182 aa, Theileria annulata
MRPLSEDEVQIVLKKLASYIGDKVLQMVENNKSGQHYFRLHNERVYYIRLQWNIYFLYENILKYVGSISSKKLISAGVCLGKFTKSKQFRLHITALEYLSYYSKNKVWLKMDQPFLYGGNVLKKHVDQISEGIEQNAGVVVMSKNIPLGFGITSKSTENLRNSLPDDIAVINQVINISKKLC

SEQ ID NO: 7150 - DNA, 543 bp, Sus scrofa
  CDS (1)..(543)
atgcggcctctgactgaagaggagacgcgtgtaatgtttgagaagatagcaaaatacatcggggagaatcttcagctgctggttgacaggcccgacgacacctactgtttcaggctgcacaacgaccgggtttactatgtgagtgaaaagatcttgaaattggccgctaatatctctggtgacaagctgatgtcgctgggaacgtgctttggaaaattcacgaagacccacaagtttcggttgcacatcacagctctggattacttagcaccttatgccaagtataaagtgtggataaagcctggagcagagcagtccttcctgtatgggaaccatgtgctgaaatctggacttggtcgaatcactgaaaatacttcacagtaccagggagttgtggtgtactccatggcagacatccctttgggttttggggtggcagcaaagtctacacaagactgcaggaaagtagaccccatggcgattgtggtatttcatcaagcagacattggggaatatgtgcggcatgaagagacattgacttaa

SEQ ID NO: 7151 - protein, 180 aa, Sus scrofa
MRPLTEEETRVMFEKIAKYIGENLQLLVDRPDDTYCFRLHNDRVYYVSEKILKLAANISGDKLMSLGTCFGKFTKTHKFRLHITALDYLAPYAKYKVWIKPGAEQSFLYGNHVLKSGLGRITENTSQYQGVVVYSMADIPLGFGVAAKSTQDCRKVDPMAIVVFHQADIGEYVRHEETLT

SEQ ID NO: 7152 - DNA, 543 bp, Caenorhabditis briggsae
  CDS (1)..(543)
atgcgcccattgaccgaggacgaaacatctcttgttttcgctaaactggcatcattcatcggagacaatgtgtcgatgctcatcgacagaaatgacggagattattgtttcagaaatcacaaggagcgtgtctactactgctcagagaacttgatgcgtcaggctgcctgcatctcccgtgaaccactcctttcgttcggaagctgccttggaaagttcaccaagtcgaaaaaattccatctccaaatcacagcacttgattatctggcaccatatgccaaattcaaagtctggctcaaaccaaacgctgagcagcaattcctttacggcaacaacattctcaaatccggaatcgccagaatgaccgacggcactccaactcatgctggtatcgtcgtatactcgatgactgatgttcctttgggatttggagtttcggctaaaggcactgcagacagtaaacgtgctgacccaactgcacttgtcgttcttcatcagtgtgatcttggagagtatctcagaaacgagagtcatctcaactaa

SEQ ID NO: 7153 - protein, 180 aa, Caenorhabditis briggsae
MRPLTEDETSLVFAKLASFIGDNVSMLIDRNDGDYCFRNHKERVYYCSENLMRQAACISREPLLSFGSCLGKFTKSKKFHLQITALDYLAPYAKFKVWLKPNAEQQFLYGNNILKSGIARMTDGTPTHAGIVVYSMTDVPLGFGVSAKGTADSKRADPTALVVLHQCDLGEYLRNESHLN

SEQ ID NO: 7154 - DNA, 543 bp, Xenopus laevis
  CDS (1)..(543)
atgaggcccctcacggacgaagagacaagagcgatgtttgaaaagttatcaaaatatataggagagaatatcaagttgctggtggaccggcctgatgggacgtactgctttcggctacacaacgatcgggtttattatgtgagtgaaaagatccttaaacttgcaaccaatattgctcgagacaaattagtatcctttggaacctgctttggaaagtttaccaagactcagaagtttcgtctacatgttacagctttggattatctggctccctatgcaaagtacaaagtatgggtgaaacctggagcagagcagtcttttctttatggaaaccatgtgctaaaatctggcttgggacgtatcacagagaacacatctcagtaccagggtgtggtggtgtattccatggctgatgtaccactgggattcggtgtggccgcaaagtcaactcaggagtgcagaaagcttgatcctatggcaattgtggtttttcaccaggcagatgtgggagagtacatcagacatgaagataccttaacataa

SEQ ID NO: 7155 - protein, 180 aa, Xenopus laevis
MRPLTDEETRAMFEKLSKYIGENIKLLVDRPDGTYCFRLHNDRVYYVSEKILKLATNIARDKLVSFGTCFGKFTKTQKFRLHVTALDYLAPYAKYKVWVKPGAEQSFLYGNHVLKSGLGRITENTSQYQGVVVYSMADVPLGFGVAAKSTQECRKLDPMAIVVFHQADVGEYIRHEDTLT

SEQ ID NO: 7156 - DNA, 564 bp, Arabidopsis thaliana
  CDS (1)..(564)
atgcgtcctttagacgagaccgagacaaccgtcgtcttcgagaagctcttcaaattcgtcggcaacaacctcaagaagatcgtcgagaacccatcagacgaaggacccgaatctacacccggcagctactgcttccgcctccagaaaaacagagtctactacgtcagcgaagccctcgtgaagcgagccacaaacatctccaggaaaaacctagtctccttcggaacctgcatcgggaaatacactcacgccggtagtttccatctgacgattatgtcactcaatatcttggcggcgaatgctaaacacaaggtatggcttaaacccacttcggagatgtcgtttctttatgggaaccatgtcttgaaaggtggattagggaggattactgatagtattgttcctggagatggtgttgttgtgttctcgatgtctgatgttccgttagggtttgggattgctgcgaagagtacacaggattgtaggaaattggatcctaatggtattgttgtgcttcatcaggctgatattggagagtatttgaggggtgaagatgacctttga

SEQ ID NO: 7157 - protein, 187 aa, Arabidopsis thaliana
MRPLDETETTVVFEKLFKFVGNNLKKIVENPSDEGPESTPGSYCFRLQKNRVYYVSEALVKRATNISRKNLVSFGTCIGKYTHAGSFHLTIMSLNILAANAKHKVWLKPTSEMSFLYGNHVLKGGLGRITDSIVPGDGVVVFSMSDVPLGFGIAAKSTQDCRKLDPNGIVVLHQADIGEYLRGEDDL

SEQ ID NO: 7158 - DNA, 456 bp, Schistosoma japonicum
  CDS (1)..(456)
atgagagatctaaagaaagatgagttcgataaagttgtagccaaactacagaaatatattaaagatgtcgatgaattattgaacagaccagacgacaagtacaatttctactaccatcgtgatcgtgtcttttattgccgttcaacgctcgcaaaacacgcagcatcaatcaagaaaaaacatttgctaagctttggaacttgtatcggtcgcttctcaaaaacaggcaactttagactccacataaccgctctcgacttcttatcaccgtatgccatgtttcgtgtatggttaaaagcatctgctgaacaacagtttctttacggacaaaatgttttgcgatcaggtatcgctaagatgtctgacaacactccgcagtatcccggtgttgttgtgatgaacatgagtgatatgcctctaggtttggggttgctgccaagtcatctcttcaggtga

SEQ ID NO: 7159 - protein, 151 aa, Schistosoma japonicum
MRDLKKDEFDKVVAKLQKYIKDVDELLNRPDDKYNFYYHRDRVFYCRSTLAKHAASIKKKHLLSFGTCIGRFSKTGNFRLHITALDFLSPYAMFRVWLKASAEQQFLYGQNVLRSGIAKMSDNTPQYPGVVVMNMSDMPLGLGLLPSHLFR

SEQ ID NO: 7160 - DNA, 543 bp, Homo sapiens
  CDS (1)..(543)
atgcggcctttgactgaagaggagacccgtgtcatgtttgagaagatagcgaaatacattggggagaatcttcaactgctggtggaccggcccgatggcacctactgtttccgtctgcacaacgaccgggtgtactatgtgagtgagaagattatgaagctggccgccaatatttccggggacaagctggtgtcgctggggacctgctttggaaaattcactaaaacccacaagtttcggttgcacgtcacagctctggattaccttgcaccttatgccaagtataaagtttggataaagcctggtgcagagcagtccttcctgtatgggaaccatgtgttgaaatctggtctgggtcgaatcactgaaaatacttctcagtaccagggcgtggtggtgtactccatggcagacatccctttgggttttggggtggcagccaaatctacacaagactgcagaaaagtagaccccatggcgattgtggtatttcatcaagcagacattggggaatatgtgcggcatgaagagacgttgacttaa

SEQ ID NO: 7161 - protein, 180 aa, Homo sapiens
MRPLTEEETRVMFEKIAKYIGENLQLLVDRPDGTYCFRLHNDRVYYVSEKIMKLAANISGDKLVSLGTCFGKFTKTHKFRLHVTALDYLAPYAKYKVWIKPGAEQSFLYGNHVLKSGLGRITENTSQYQGVVVYSMADIPLGFGVAAKSTQDCRKVDPMAIVVFHQADIGEYVRHEETLT

SEQ ID NO: 7162 - DNA, 543 bp, Mus musculus
  CDS (1)..(543)
atgaggcccttgactgaagaagagacccgggtcatgtttgagaagatcgcgaagtacatcggagagaacctgcaactcctagtggacagacccgacggcacgtactgtttccggctgcacaacgaccgagtgtactatgtgagtgagatgatgctgaagctggccgccaacatctccggagacaagctcgtgtcgctggggacgtgttttgggaagtttaccaagacccacaagttccgcttgcacgtgacagctctggattacctggccccctatgccaagtataaagtgtgggtaaagccgggagcagagcagtccttcttgtatggaaaccatgtgttgaaatccggtctgggtcgaattactgagaacacatctcagtaccagggagtggttgtctattccatggcggacattcctctgggttttggggtggcagcaaagtctacccaagactgccgaaaagtggaccccatggcaattgtggtgttccaccaagcagacattggggagtacgtacgccatgaagagacactgacttag

SEQ ID NO: 7163 - protein, 180 aa, Mus musculus
MRPLTEEETRVMFEKIAKYIGENLQLLVDRPDGTYCFRLHNDRVYYVSEMMLKLAANISGDKLVSLGTCFGKFTKTHKFRLHVTALDYLAPYAKYKVWVKPGAEQSFLYGNHVLKSGLGRITENTSQYQGVVVYSMADIPLGFGVAAKSTQDCRKVDPMAIVVFHQADIGEYVRHEETLT

SEQ ID NO: 7164 - DNA, 543 bp, Rattus norvegicus
  CDS (1)..(543)
atgaggcctttgactgaagaagagacccgcgtaatgtttgagaagattgcgaaatacattggagagaatctacaactcctggtggacagaccggacggcacctactgtttccggctgcacaacgaccgagtgtactatgtgagtgagatgatcctgaagctggccgccaacatctccggagataagctagtgtccctgggtacgtgttttggaaagtttaccaagacccacaagttccggttgcacgttacagctctggatttccttgcaccctacgccaagtataaagtgtggataaagcctggagctgagcagtccttcttgtatggaaaccatgtgttgaaatccggtctgggtcggatcactgaaaacacgtctcagtaccagggagtagtggtttattccatggcagacgttcctttgggttttggggtggcagcaaagtctacccaagactgcaggaaagtggaccccatggcaattgtggtgttccatcaagcagacattggggagtacatacgccatgaagagacgttaacttaa

SEQ ID NO: 7165 - protein, 180 aa, Rattus norvegicus
MRPLTEEETRVMFEKIAKYIGENLQLLVDRPDGTYCFRLHNDRVYYVSEMILKLAANISGDKLVSLGTCFGKFTKTHKFRLHVTALDFLAPYAKYKVWIKPGAEQSFLYGNHVLKSGLGRITENTSQYQGVVVYSMADVPLGFGVAAKSTQDCRKVDPMAIVVFHQADIGEYIRHEETLT

SEQ ID NO: 7166 - DNA, 525 bp, Archaeoglobus fulgidus
  CDS (1)..(525): transl_table=11
atggcgtttagacaaccaaatactaaggaactgaaagtaataagaaaagccctcagctactacggctctggcgattttttgagccattacgctctgcttgttaaggaaggtgagaagaaggaggtttacggagtttccaaggagctttacggcgtgattggagagcttaatccgcactacgcaggagtcaaaattggggaggtggggagaaggttcaggttctcccttgaaggtacgttctggcttctgagaaacagcaggaacagagtgtgggtgaatgaacggggggagatgctgttcctctacggcagggacattttcgcaggttcagttgagagagcctctgaattcggggaaaactcaattgttttcgtttgcaacagattcgacgacgttcttggaatagggagaagcaggcattcatctgacgagctgagcaatcttcccgaagataaggtgtttgtggagaacctggttgacaggggggagtacctgaggcatcagaaaacctacctttccttttag

SEQ ID NO: 7167 - protein, 174 aa, Archaeoglobus fulgidus
MAFRQPNTKELKVIRKALSYYGSGDFLSHYALLVKEGEKKEVYGVSKELYGVIGELNPHYAGVKIGEVGRRFRFSLEGTFWLLRNSRNRVWVNERGEMLFLYGRDIFAGSVERASEFGENSIVFVCNRFDDVLGIGRSRHSSDELSNLPEDKVFVENLVDRGEYLRHQKTYLSF

SEQ ID NO: 7168 - DNA, 847 bp, Brassica napus; identical to SEQ ID NO: 2342
  CDS (67)..(636)

SEQ ID NO: 7169 - protein, 189 aa, Brassica napus; identical to SEQ ID NO: 2343

SEQ ID NO: 7170 - DNA, 741 bp, Brassica napus; identical to SEQ ID NO: 2346
  CDS (24)..(587)

SEQ ID NO: 7171 - protein, 187 aa, Brassica napus; identical to SEQ ID NO: 2347

SEQ ID NO: 7172 - DNA, 754 bp, Brassica napus; identical to SEQ ID NO: 2372
  CDS (21)..(584)

SEQ ID NO: 7173 - protein, 187 aa, Brassica napus; identical to SEQ ID NO: 2373

SEQ ID NO: 7174 - DNA, 564 bp, Glycine max; identical to SEQ ID NO: 2448
  CDS (1)..(564)

SEQ ID NO: 7175 - protein, 187 aa, Glycine max; identical to SEQ ID NO: 2449

SEQ ID NO: 7176 - DNA, 567 bp, Zea mays; identical to SEQ ID NO: 2591
  CDS (1)..(567)

SEQ ID NO: 7177 - protein, 188 aa, Zea mays; identical to SEQ ID NO: 2592

SEQ ID NO: 7178 - DNA, 25 bp, Artificial sequence
  primer
atgagacagctaacagaagaagaga

SEQ ID NO: 7179 - DNA, 25 bp, Artificial sequence
  primer
ctaagtaaacaaggtgtcttcatct

SEQ ID NO: 7180 - protein, 398 aa, Artificial sequence
  consensus sequence
  Variant (3)..(3): Xaa in position 3 is any amino acid
  Variant (4)..(7): Xaa in position 4 to 7 is any or no amino acid
  Variant (9)..(11): Xaa in position 9 to 11 is any amino acid
  Variant (13)..(13): Xaa in position 13 is any amino acid
  Variant (14)..(23): Xaa in position 14 to 23 is any or no amino acid
  Variant (25)..(25): Xaa in position 25 is any amino acid
  Variant (27)..(30): Xaa in position 27 to 30 is any amino acid
  Variant (31)..(119): Xaa in position 31 to 119 is any or no amino acid
  Variant (121)..(121): Xaa in position 121 is any amino acid
  Variant (123)..(132): Xaa in position 123 to 132 is any amino acid
  Variant (133)..(225): Xaa in position 133 to 225 is any or no amino acid
  Variant (229)..(231): Xaa in position 229 to 231 is any amino acid
  Variant (234)..(234): Xaa in position 234 is any amino acid
  Variant (236)..(240): Xaa in position 236 to 240 is any amino acid
  Variant (241)..(252): Xaa in position 241 to 252 is any or no amino acid
  Variant (254)..(260): Xaa in position 254 to 260 is any amino acid
  Variant (262)..(262): Xaa in position 262 is any amino acid
  Variant (264)..(264): Xaa in position 264 is any amino acid
  Variant (266)..(266): Xaa in position 266 is any amino acid
  Variant (268)..(268): Xaa in position 268 is any amino acid
  Variant (271)..(271): Xaa in position 271 is any amino acid
  Variant (273)..(274): Xaa in position 273 to 274 is any amino acid
  Variant (275)..(276): Xaa in position 275 to 276 is any or no amino acid
  Variant (278)..(278): Xaa in position 278 is any amino acid
  Variant (280)..(281): Xaa in position 280 to 281 is any amino acid
  Variant (283)..(283): Xaa in position 283 is any amino acid
  Variant (285)..(287): Xaa in position 285 to 287 is any amino acid
  Variant (289)..(292): Xaa in position 289 to 292 is any amino acid
  Variant (293)..(293): Xaa in position 293 is any or no amino acid
  Variant (295)..(295): Xaa in position 295 is any amino acid
  Variant (297)..(297): Xaa in position 297 is any amino acid
  Variant (299)..(300): Xaa in position 299 to 300 is any amino acid
  Variant (301)..(302): Xaa in position 301 to 302 is any or no amino acid
  Variant (304)..(305): Xaa in position 304 to 305 is any amino acid
  Variant (310)..(312): Xaa in position 310 to 312 is any amino acid
  Variant (313)..(336): Xaa in position 313 to 336 is any or no amino acid
  Variant (338)..(349): Xaa in position 338 to 349 is any amino acid
  Variant (350)..(351): Xaa in position 350 to 351 is any or no amino acid
  Variant (354)..(354): Xaa in position 354 is any amino acid
  Variant (356)..(359): Xaa in position 356 to 359 is any amino acid
  Variant (361)..(361): Xaa in position 361 is any amino acid
  Variant (367)..(368): Xaa in position 367 to 368 is any amino acid
  Variant (370)..(370): Xaa in position 370 is any amino acid
  Variant (372)..(374): Xaa in position 372 to 374 is any amino acid
  Variant (375)..(387): Xaa in position 375 to 387 is any or no amino acid
  Variant (389)..(389): Xaa in position 389 is any amino acid
  Variant (391)..(391): Xaa in position 391 is any amino acid
  Variant (395)..(395): Xaa in position 395 is any amino acid
  Variant (397)..(397): Xaa in position 397 is any amino acid
MRXXXXXLXXXEXXXXXXXXXXXFXKXXXXXXXXXXXXXXXXXXXXXXXXXXXXXXXXXXXXXXXXXXXXXXXXXXXXXXXXXXXXXXXXXXXXXXXXXXXXXXXXXXXXXXXXXXXXXGXNXXXXXXXXXXXXXXXXXXXXXXXXXXXXXXXXXXXXXXXXXXXXXXXXXXXXXXXXXXXXXXXXXXXXXXXXXXXXXXXXXXXXXXXXXXXXXXXXXXXXXXXFRLXXXRVXYXXXXXXXXXXXXXXXXXAXXXXXXXLXSXGXCXGKXTXXXXFXLXXTXLXXXAXXXXXKXWXKXXXXEXXFLYGXXXXXXXXXXXXXXXXXXXXXXXXXXXKXXXXXXXXXXXXXXGVXVXXXXDXPLGFGXXAXSXXXXXXXXXXXXXXXXQXDXGEYXRXE

SEQ ID NO: 7181 - DNA, 1383 bp, Saccharomyces cerevisiae
  CDS (1)..(1383)
atgatgcttgaagggtatacggtacaacctccacagtctactttgataggtgacattgaaattcaggacgaaaatgcaaaccaagaagttaagaacgtactttaccaaggagttcaaaagggtataaaaaggctagaaaaaagacaaaggagggttgcattaggtgatgtaacctctcaaaaggcaaacaaaatacacaatgctatacataataaattccatcagacgaagaacaattttgaaatagagaacatacgctcatcggccttggtaaaagaacaacaacgagacgtaaggcatgaagatagcgactattttttaattgatagttctgaaggctcttctactgatgacgaacaagttaatgaagatgctattgatgatttgttaagtcgaagagtaaatgatcagcagattcaagccgatgaagtgtatgaagatttcgatggagaaatgcaagatgtcattgaagaggatgttgatagtcaaattgaaccactatcaccaataaacaacgatgaaattcagactgagctggacagggcgtttgaaaaatattttcggtcggttcccaatccgctggatgatgatacccatgatgttgtgatggttgtggagtacgcttccgacatattctattacttgagagaacttgaagtgaaatataggcctaatccctactatatgcaaaatcaagtagagcttacatggccgttcagacgaactatgatagattggctagttcaactgcattttagatttcaacttttaccagaaacgctatacctgacgattaatatagtggatagatttctgtcaaagaagaccgttactttgaacaggtttcaattggttggtgtatcggctttatttattgctgccaagtttgaagagattaactgccccactttggatgatctagtttacatgctggaaaatacatacactagagatgacattattagagcggaacagtatatgatagatactctggaatttgaaataggttggccaggacccatgccatttttaagaaggataagtaaagcagatgactatgacttcgaaccaagaacattagcaaagtacttattggaaactacaatagtagaacccaaactagtggctgcggcaccaagctggttagctgctggcgcgtattttctgagcagaacaattcttggttcaaatgattggtctttaaaacatgtattctactctggctatacatccagccaaataattcctttagcatcactgatattggagaattgcaagaacgcatctcgacgccatcattcaatttggaaaaaatactttgaccaaaagcattaccgctgttctcaaattgtagaagaatggattgtttcgacagaagcctaa

SEQ ID NO: 7182 - protein, 460 aa, Saccharomyces cerevisiae
MMLEGYTVQPPQSTLIGDIEIQDENANQEVKNVLYQGVQKGIKRLEKRQRRVALGDVTSQKANKIHNAIHNKFHQTKNNFEIENIRSSALVKEQQRDVRHEDSDYFLIDSSEGSSTDDEQVNEDAIDDLLSRRVNDQQIQADEVYEDFDGEMQDVIEEDVDSQIEPLSPINNDEIQTELDRAFEKYFRSVPNPLDDDTHDVVMVVEYASDIFYYLRELEVKYRPNPYYMQNQVELTWPFRRTMIDWLVQLHFRFQLLPETLYLTINIVDRFLSKKTVTLNRFQLVGVSALFIAAKFEEINCPTLDDLVYMLENTYTRDDIIRAEQYMIDTLEFEIGWPGPMPFLRRISKADDYDFEPRTLAKYLLETTIVEPKLVAAAPSWLAAGAYFLSRTILGSNDWSLKHVFYSGYTSSQIIPLASLILENCKNASRRHHSIWKKYFDQKHYRCSQIVEEWIVSTEA

SEQ ID NO: 7183 - DNA, 1095 bp, Danio rerio
  CDS (1)..(1095)
atgtcgcctcgagttacacgagcgcgctccaaatccgccgccacgcgtgcgcagaagccgcagacagcaccgtattttctccgctccagagtcccgttaggaaacgcgtccaacctgatcgggcaggagagaggtgtggaggtgctgaagaagccgaaagctgcgcgcgcgaagaagcaaagcgcaaaatccaactgcgtggccaaagagaaggagaaaacgccagagccggttcctcaggctccagactgtgccgccgctgccgctgtgtttcaggctgattctcctcagtgtttctccagtcttctgctccaggagattcaggattccggggacgctgctgatgcgcagatgtgctgtgaatatgagcgagacatctacacttatttacaacacctcgaggttgcgctctccgtcaggccgtgttatctgcagggtcagcaggtgtctgcaggtatgcgagcgctggctctggattggctgatgcaggtgcagagagagttcagactgcagcccgagactctgttcatgaccgtcggcatcatcgaccgcttcctgcagagtaacccggtgccgaagcagtatctgcagctggtgtgtgtgacggccatgctgctgtcctgtaaatatgaggaggtgtatccgccgacggtgggagatttcgcgttcgtgactgatggagcgtactcatgtggagacgtacgacgcatggagaggatcatcctcaaacgactcgactacagcctcggacgacccaacccgctgcactttctgcagagagcttgcagagtcagccaggcctctgcgcagcatcagtctctggctcagtttctcctggaagtctcagttctggattctgatcttctccatgttcctccgtctctcctcgctgctgctgcgtttgctgaatctcgcaggattctggactctggagagcggagtctccatctccagcatcagagcggatacagtgcagaaactctgactccagtgatgctgcagatggagaatcagctgaagaagatcagctctgaacacgcggagatccacagcagataccagaagcagatgcgcatggccagaacactgcgctga

SEQ ID NO: 7184 - protein, 364 aa, Danio rerio
MSPRVTRARSKSAATRAQKPQTAPYFLRSRVPLGNASNLIGQERGVEVLKKPKAARAKKQSAKSNCVAKEKEKTPEPVPQAPDCAAAAAVFQADSPQCFSSLLLQEIQDSGDAADAQMCCEYERDIYTYLQHLEVALSVRPCYLQGQQVSAGMRALALDWLMQVQREFRLQPETLFMTVGIIDRFLQSNPVPKQYLQLVCVTAMLLSCKYEEVYPPTVGDFAFVTDGAYSCGDVRRMERIILKRLDYSLGRPNPLHFLQRACRVSQASAQHQSLAQFLLEVSVLDSDLLHVPPSLLAAAAFAESRRILDSGERSLHLQHQSGYSAETLTPVMLQMENQLKKISSEHAEIHSRYQKQMRMARTLR

SEQ ID NO: 7185 - DNA, 1197 bp, Rattus norvegicus
  CDS (1)..(1197)
atggcgctgctccgacgcccgacggtgtccagtgatttgaagaatattgacacaggagttaatcctaaagctaagagccatgtgactgtccggcgagctgttttagaagaaattggaaataaagttagagccagaccggctcaagtggctaagaaacctcagaataccaaagtaccagtccagcccaccaaagcaataaatgccagcaaacagccgaaacctacagcttctgtgaaaccagtgcagatggagacactggccccgaaggatcctctgcctgcccctgaggatgtctccatgaaggaagagagcctctgccaagctttctctgatgctttgctctgcaagattgaggacatagataatgaggacggggagaaccctcagctctgcagtgactacgtgaaggacatctaccagtacctcaggcagcttgaggctttgcagtccatcaatccacatttcttagatggaagagacataaacggacgcatgcgtgccatcctggtggactggctggtccaagtccattccaagtttaggcttctgcaggagactctgtacatgtgcattgctatcatggaccggttccttcaggctcagccagtctgccggaagaagctgcaactggttgggatcacagctctgctcttggcttccaaatatgaggagatgttttctccaaatatcgaagactttgtttatatcacagataatgcttacaccagttcccaaatccgagaaatggagactctgattttgaaagagttgaaattcgagttgggccggcctttgccactccacttcctaaggcgagcctcaaaagccggggaggtggatgttgaacagcacacgttagccaagtacctgatggagctgaccctcgtcgactacgacatggtgcattaccacccttctcaggtcgcagctgctgcttcctgcctctctcagaaggtgctgggccaaggaaaatggaatttaaagcagcagtattacacaggctacatggagagtgaaatactggaagtcatgcagcacatggccaagaacgtcgtgaaagtcaatgaaaacctcaccaagttcatcgctgtcaagaacaaatatgccagcagcaggctcctgaagatcagcacgatccctcagctgaactccagaaccatcaaagacctggcctcccctctgatgggcagaccctag

SEQ ID NO: 7186 - protein, 398 aa, Rattus norvegicus
MALLRRPTVSSDLKNIDTGVNPKAKSHVTVRRAVLEEIGNKVRARPAQVAKKPQNTKVPVQPTKAINASKQPKPTASVKPVQMETLAPKDPLPAPEDVSMKEESLCQAFSDALLCKIEDIDNEDGENPQLCSDYVKDIYQYLRQLEALQSINPHFLDGRDINGRMRAILVDWLVQVHSKFRLLQETLYMCIAIMDRFLQAQPVCRKKLQLVGITALLLASKYEEMFSPNIEDFVYITDNAYTSSQIREMETLILKELKFELGRPLPLHFLRRASKAGEVDVEQHTLAKYLMELTLVDYDMVHYHPSQVAAAASCLSQKVLGQGKWNLKQQYYTGYMESEILEVMQHMAKNVVKVNENLTKFIAVKNKYASSRLLKISTIPQLNSRTIKDLASPLMGRP

SEQ ID NO: 7187 - DNA, 1266 bp, Rattus norvegicus
  CDS (1)..(1266)
atgcgtcgccacagctcgaagagtggagtcgcactgcctccagtgggccaaggtcctgatgcttgtcagatgctcacccgagctcagcttggccaggatcccccacagagaaccgtgctaggagtgttgactgaaaatgagcagtacaggagggcctgtggccaggagatcgcaacgatcagatgtttttctggatcagaaaatgtcttccctgcagctggaaagaaagtactccctgacaacggggtcagtgagccagccaagcatggatttgatatctacatggatgatcctgaacagggggacagagacagctgcccagggagagagggcatagtgtttgaggatgtgtatgaagtagacaccagcatgctcaagtcagatctccacttcctgctggatttcaacacagtttccccaatgctggttgactccaccgcccatgcccagtcggaggaagcaacggattttggttcagatgtgatcaacgtaacggaatatgcagaggagattcatcgataccttcgagaagctgaagtaagacacagacccaaggctcactacatgaggaagcagccggacatcacggagggcatgcgcgccatcctggtggactggctggtggaggttggggaagaatataaactccgcacagagaccctgtacttggctgtcaacttcctggacaggtttctttcctgcatgtctgttctgagagggaaattgcagcttgtcgggacagcagctattctcctggcttcgaaatacgaagagatatacccgcccgatgtcgatgagtttgtctacatcactgacgacacgtacacaaagcgacagctactgaggatggagcatctgctgctgaaagtcctggcattcgatctgaccgttccaaccaccaaccagttcctccttcagtacttaaggcggcaaggggtgtgcatcaggactgagaatttggccaagtatgttgcagaactgagccttctggaagctgacccattcttgaagtatcttccttccttggtagcagcagcagcttactgtctggcaaactatattgtgaacagacacttctggccagaaacacttgctgcatttacgggctattcattaaatgagattgtgccttgcctgagtgagctgcataaagcatgcctcagtataccccatcgaccgcagcaagcaatcagggagaagtacaaggcttcgaagtacctgcacgtgtccctcatggagccacccgtagttcttcccctgcagtga

SEQ ID NO: 7188 - protein, 421 aa, Rattus norvegicus
MRRHSSKSGVALPPVGQGPDACQMLTRAQLGQDPPQRTVLGVLTENEQYRRACGQEIATIRCFSGSENVFPAAGKKVLPDNGVSEPAKHGFDIYMDDPEQGDRDSCPGREGIVFEDVYEVDTSMLKSDLHFLLDFNTVSPMLVDSTAHAQSEEATDFGSDVINVTEYAEEIHRYLREAEVRHRPKAHYMRKQPDITEGMRAILVDWLVEVGEEYKLRTETLYLAVNFLDRFLSCMSVLRGKLQLVGTAAILLASKYEEIYPPDVDEFVYITDDTYTKRQLLRMEHLLLKVLAFDLTVPTTNQFLLQYLRRQGVCIRTENLAKYVAELSLLEADPFLKYLPSLVAAAAYCLANYIVNRHFWPETLAAFTGYSLNEIVPCLSELHKACLSIPHRPQQAIREKYKASKYLHVSLMEPPVVLPLQ

SEQ ID NO: 7189 - DNA, 1290 bp, Arabidopsis thaliana
  CDS (1)..(1290)
atggttagatcagatgaaaatagccttggattaatcggatcaatgagtctccaagggggaggagtagtaggaaagatcaagacgacggcaacaacaggaccgacaagaagagcactaagtactattaacaagaacatcactgaagcgccgtcttacccttatgctgtcaacaagagatcagtttctgaaagagatggcatttgtaataaaccacctgtgcatcgaccagttactaggaagtttgctgctcagttagcagatcataagccacatatccgtgatgaggaaactaagaaaccagactcagtttcaagtgaagaaccagagacgattatcattgatgtggatgaaagtgataaagaaggaggtgactctaatgagccaatgtttgtacaacatactgaagcaatgctggaggagattgaacagatggagaaggagattgaaatggaagatgcagacaaagaagaagagcctgtgatcgatattgatgcctgtgataagaataatcctttggctgcggttgaatatatccatgatatgcataccttctacaagaattttgagaaacttagttgcgtgcctcctaactatatggacaatcaacaagatcttaatgagagaatgagaggaatcctcattgactggttaattgaggtgcactacaagtttgaactgatggaggaaactctttatctcacaatcaatgtcatcgacagattccttgcggttcatcaaatcgtgaggaaaaagcttcagcttgttggtgttactgctttgttgcttgcatgtaaatatgaagaagtttcagttccagtggtagatgatctcatcttgatctctgacaaagcttactctagaagagaagtgctagatatggagaagctaatggccaacaccttgcaattcaatttctctctaccaactccatatgttttcatgaaacgatttctcaaagctgcccaatctgacaagaagcttgagattttatcattctttatgatcgagctttgccttgtggagtatgagatgctagagtatcttccatctaagctggcggcctcagcaatctacactgctcagtgtacacttaagggatttgaagaatggagcaaaacctgtgagtttcacacaggctacaacgaaaaacagctactggcatgtgcgagaaagatggttgctttccatcacaaggcaggaacagggaagctcacaggagttcacagaaagtacaacacatctaagttctgtcatgctgcaagaactgaaccagctgggtttctgatttaa

SEQ ID NO: 7190 - protein, 429 aa, Arabidopsis thaliana
MVRSDENSLGLIGSMSLQGGGVVGKIKTTATTGPTRRALSTINKNITEAPSYPYAVNKRSVSERDGICNKPPVHRPVTRKFAAQLADHKPHIRDEETKKPDSVSSEEPETIIIDVDESDKEGGDSNEPMFVQHTEAMLEEIEQMEKEIEMEDADKEEEPVIDIDACDKNNPLAAVEYIHDMHTFYKNFEKLSCVPPNYMDNQQDLNERMRGILIDWLIEVHYKFELMEETLYLTINVIDRFLAVHQIVRKKLQLVGVTALLLACKYEEVSVPVVDDLILISDKAYSRREVLDMEKLMANTLQFNFSLPTPYVFMKRFLKAAQSDKKLEILSFFMIELCLVEYEMLEYLPSKLAASAIYTAQCTLKGFEEWSKTCEFHTGYNEKQLLACARKMVAFHHKAGTGKLTGVHRKYNTSKFCHAARTEPAGFLI

SEQ ID NO: 7191 - DNA, 984 bp, Arabidopsis thaliana
  CDS (1)..(984)
atggtgtctaagaaagataaacagattcattccgaccataaccctcaagatgcttccccggtagagtgggcggaaattcgacataagctacttgcgtttcaagagaacattcaatcaggctctgacattgacgctaggtctgatgatccacagatgtgtggactttatgtctcagatatctacgagtatctccgtgaattagaggtgaagccaaagctaagacctttacatgattacattgaaaagattcaagaagatataacaccaagcaagagaggtgttttggtagattggttagtggaagttgctgaagagttcgaactcgtgtctgaaacactctatctcactgtctcttacattgatagattcttgtcattaaagatggttaacgagcactggcttcagcttgtgggagtttctgcaatgtttatcgcttcgaagtatgaagagaaacgtcgccctaaagtggaggatttttgttacattacggctaatacttatacgaaacaagatgtgttgaagatggaagaggatatacttctcgcgcttgagtttgaactaggaaggcctacgacaaatacttttctaagacggttcataagggttgcacaagaagatttcaaagtgccaaacttgcagctagagcctctttgttgctatctgtcagaactaagtatgttagattatagttgtgtgaagtttgttccatctttgttggctgcttctgctgtctttctcgctcgattcatcatccttcctaaccaacatccttggagtcaaatgttggaagaatgcacaaagtacaaagcggctgatctacaagtgtgtgtggagatcatgcttgacttgtacctgagcagaagtgaaggtgcttcaaaagctgttagagagaaatacaagcaacataagttccaatacgttgcggcaattcctgtctaccaagagcttccggttaccttttgggaggatgttgttaccatttga

SEQ ID NO: 7192 - protein, 327 aa, Arabidopsis thaliana
MVSKKDKQIHSDHNPQDASPVEWAEIRHKLLAFQENIQSGSDIDARSDDPQMCGLYVSDIYEYLRELEVKPKLRPLHDYIEKIQEDITPSKRGVLVDWLVEVAEEFELVSETLYLTVSYIDRFLSLKMVNEHWLQLVGVSAMFIASKYEEKRRPKVEDFCYITANTYTKQDVLKMEEDILLALEFELGRPTTNTFLRRFIRVAQEDFKVPNLQLEPLCCYLSELSMLDYSCVKFVPSLLAASAVFLARFIILPNQHPWSQMLEECTKYKAADLQVCVEIMLDLYLSRSEGASKAVREKYKQHKFQYVAAIPVYQELPVTFWEDVVTI

SEQ ID NO: 7193 - DNA, 1296 bp, Arabidopsis thaliana
  CDS (1)..(1296)
atgggtggatcggatgagaacagacacggagtcattggaccgatgaatcgacaacaagggggtttacgtggaggaaaggtaattccgacgaatggacagacaagaagggcactgagtaatataaacaagaacatcatcggagctccggtctatccttgtgctgtcaagagaccattcactgagaaaaatgggatttgtaacaagaagattccacctgttccagtgcatcgaccagttactaggaaatttgctgctcaattagctgagaacaatctccaaatccacaaggaggaaaccaagaaaccagacttgatttcaaacgaagcattagatagaatcataacagatgtggaagaaggagactttaatgaaccaatgtttgttcaacatactgaagcaatgcttgaagagattgacaaaatggaagggattgaaatgcaagattcaaatgatattgatgctgaagtagaagagtctgtgatggatatagacagctgtgacaagaacaatcctttatctgtagttgaatacattaatgacatatattgcttctacaagaaaaatgagtgtcgtagctgtgtcccgcctaactacatggagaatcaacatgacattaacgagaggatgagaggaatcctttttgattggttgattgaggtacattacaagtttgagctgatggaggagacgctttacctgacaatcaatctcattgacagatttcttgcggttcatcaacatatcgcgaggaaaaagcttcagcttgtgggtgtaacagctatgttacttgcttgcaaatatgaagaagtttcagttccagttgttgatgatctaatcctgatctctgacaaggcttatactaggacagagattcttgatatggagaagttaatggcgaataccttgcaattcaatttctgtctgccaactccatatgtgttcatgagacggtttctcaaagctgcacaatctgacaaaaagcttgagcttttatcattcttcatgatcgagctttgtttagtggagtacgagatgcttcagtacactccttctcagttggctgcatcggcgatctacactgctcagagcacacttaaaggatacgaggattggagcaaaaccagtgagttccactcaggctacaccgaagaagcgcttctggaatgttcgagaaagatggttggtttgcatcacaaggcagggacagggaagctaacaggtgttcacaggaaatacaacacatccaaatttggttatgctgcaagaattgaaccagctgggtttcttctgctgtga

SEQ ID NO: 7194 - protein, 431 aa, Arabidopsis thaliana
MGGSDENRHGVIGPMNRQQGGLRGGKVIPTNGQTRRALSNINKNIIGAPVYPCAVKRPFTEKNGICNKKIPPVPVHRPVTRKFAAQLAENNLQIHKEETKKPDLISNEALDRIITDVEEGDFNEPMFVQHTEAMLEEIDKMEGIEMQDSNDIDAEVEESVMDIDSCDKNNPLSVVEYINDIYCFYKKNECRSCVPPNYMENQHDINERMRGILFDWLIEVHYKFELMEETLYLTINLIDRFLAVHQHIARKKLQLVGVTAMLLACKYEEVSVPVVDDLILISDKAYTRTEILDMEKLMANTLQFNFCLPTPYVFMRRFLKAAQSDKKLELLSFFMIELCLVEYEMLQYTPSQLAASAIYTAQSTLKGYEDWSKTSEFHSGYTEEALLECSRKMVGLHHKAGTGKLTGVHRKYNTSKFGYAARIEPAGFLLL

SEQ ID NO: 7195 - DNA, 1290 bp, Arabidopsis thaliana
  CDS (1)..(1290)
atggttaactcatgcgagaacaaaatcttcgttaaacccacttcaacgacgattcttcaagatgaaacaagaagtagaaaattcggacaagagatgaagagggagaagagaagagtgttgcgtgtgattaaccagaatctcgctggtgcaagagtttatccttgtgttgtcaacaagagaggaagcttattgtctaataagcaagaagaagaagaaggatgtcaaaagaagaagtttgattctttgcgtccttcagttacaagatctggagttgaggaagagactaacaagaagctgaagccctcagttccaagtgctaacgacttcggtgattgtatatttattgatgaggaggaagctacattggaccttccaatgccaatgtcgcttgagaaaccatacattgaagctgatccaatggaagaagttgagatggaggatgtaacagtggaagaaccgatcgtggatatcgatgtcttagactcgaagaactcgcttgcggctgttgaatatgttcaagatctttacgcattttacagaacaatggagagatttagttgtgttccagtagactatatgatgcaacaaatcgacttaaacgagaagatgagagcaatactaatcgactggttaatcgaggtacatgacaagtttgatctgataaacgagacactgtttctgacagtgaatctgatagatagattcttgtccaagcaaaatgttatgagaaagaagcttcagcttgtagggttagtagctttgctgttagcttgtaagtatgaggaggtttcggttcctgttgtcgaagatttagtactcatttcggacaaagcgtatacgaggaacgatgttctagagatggagaaaacaatgttgagtactttgcaattcaatatctcgttaccgacacaatacccgttcttgaaaagattcctcaaggcagctcaagcagacaagaagtgtgaggtcttggcgtcgttcttgatcgagcttgcccttgtggagtacgagatgcttcggtttccaccatcattactagctgccacatctgtgtacactgctcaatgtacacttgatggttccaggaaatggaacagtacatgtgaattccattgtcattactctgaagaccagctcatggaatgttcacggaagctggtgagtctgcatcagagggcggcgacaggaaacttaacaggagtatataggaagtacagcacaagcaaatttggttacatagcaaaatgtgaagctgcacactttctagtgtctgagtctcatcattcttaa

SEQ ID NO: 7196 - protein, 429 aa, Arabidopsis thaliana
MVNSCENKIFVKPTSTTILQDETRSRKFGQEMKREKRRVLRVINQNLAGARVYPCVVNKRGSLLSNKQEEEEGCQKKKFDSLRPSVTRSGVEEETNKKLKPSVPSANDFGDCIFIDEEEATLDLPMPMSLEKPYIEADPMEEVEMEDVTVEEPIVDIDVLDSKNSLAAVEYVQDLYAFYRTMERFSCVPVDYMMQQIDLNEKMRAILIDWLIEVHDKFDLINETLFLTVNLIDRFLSKQNVMRKKLQLVGLVALLLACKYEEVSVPVVEDLVLISDKAYTRNDVLEMEKTMLSTLQFNISLPTQYPFLKRFLKAAQADKKCEVLASFLIELALVEYEMLRFPPSLLAATSVYTAQCTLDGSRKWNSTCEFHCHYSEDQLMECSRKLVSLHQRAATGNLTGVYRKYSTSKFGYIAKCEAAHFLVSESHHS

SEQ ID NO: 7197 - DNA, 1245 bp, Arabidopsis thaliana
  CDS (1)..(1245)
atggcgacaggaccagttgttcatcctcaaccagttagaggtgatcccatcgacctcaaaaacgcagcagcaaagaatcgtcgtgctcttggcgacattggaaacgtcgattctcttattggagtcgaaggaggaaagcttaaccgccccattactcgtaactttcgtgctcagttgctagaaaacgcacaagttgcagccgccgctaacaaaaaggctccgattcttgatggagttactaagaaacaagaagttgtaagagcggttcaaaagaaagcaagaggtgataagcgtgagccgtcaaaaccaatcgaagtgattgtgataagtcctgatacaaacgaggttgctaaagctaaagagaacaagaagaaagtgacatactcttcggttcttgatgctcgaagcaaggctgcttctaagactttggatattgattatgtcgacaaagaaaatgatcttgctgctgtggaatacgttgaggatatgtacattttctacaaagaagttgtgaatgagagcaaacctcagatgtatatgcatacacaacctgagattgatgagaagatgagatcaatccttattgattggcttgtagaagttcatgtcaagtttgatctctcccctgagactctttacctcactgtcaacataattgatcgttttctttctctgaagactgtgcctagaagagaactacagcttgtaggtgttagtgctttgcttatagcttcgaagtacgaagaaatctggcctcctcaggtcaatgatttggtatatgtgactgataactcctacaacagcagacagattctagtgatggagaaaaccattttggggaatcttgaatggtacttgacagttccaacacagtatgtgttccttgtgaggtttattaaagcctcgggttctgaccagaaactggagaacttggttcactttctagctgagttgggtttgatgcatcacgacagtttaatgttctgtccttccatgcttgctgcatcagcggtctacacagcaaggtgttgcttgaacaagactcctacttggactgatacactgaaattccacacaggctactccgaatctcagctcatggattgctcaaagcttttagctttcattcactcgaaagcgggggagagcaagctacgtggtgtgttgaagaagtattcgaaacttggaagaggtgctgttgctctgatttcaccagccaagtctcttatgtcatctgctccatga

SEQ ID NO: 7198 - protein, 414 aa, Arabidopsis thaliana
MATGPVVHPQPVRGDPIDLKNAAAKNRRALGDIGNVDSLIGVEGGKLNRPITRNFRAQLLENAQVAAAANKKAPILDGVTKKQEVVRAVQKKARGDKREPSKPIEVIVISPDTNEVAKAKENKKKVTYSSVLDARSKAASKTLDIDYVDKENDLAAVEYVEDMYIFYKEVVNESKPQMYMHTQPEIDEKMRSILIDWLVEVHVKFDLSPETLYLTVNIIDRFLSLKTVPRRELQLVGVSALLIASKYEEIWPPQVNDLVYVTDNSYNSRQILVMEKTILGNLEWYLTVPTQYVFLVRFIKASGSDQKLENLVHFLAELGLMHHDSLMFCPSMLAASAVYTARCCLNKTPTWTDTLKFHTGYSESQLMDCSKLLAFIHSKAGESKLRGVLKKYSKLGRGAVALISPAKSLMSSAP

SEQ ID NO: 7199 - DNA, 1290 bp, Arabidopsis thaliana
  CDS (1)..(1290)
atggttaatccagaggagaacaatcgtaatctcgttgtcaaacccattacagagattcttcaagatgatgataagagaagcagaaaattcggtgtagagatgaagagacagaacaggagagcattgggtgtgattaatcacaatctcgttggtgcaaaagcttatccttgtgttgttaacaagagaagaggcttatctcagagaaaacaagaaagctgtgacaagaagaagcttgattcattgcatccgtcaatttcaagatctcaggaagagactaagaagctgaaaccaagtggaaacgagtttggtgattgcatattcattgatgaagaagaggagaagaatgaagaagttacattggaccaacctatgccaatgtcattggaggaaccatacattgaatttgatccaatggaggaagaagttgagatggaggatatggaagaagaacaagaagaaccagttttggatatagacgaatacgatgcaaacaactctcttgcagctgttgaatacgtccaagatctttacgatttctaccgtaaaaccgagagatttagctgtgttcctctagattacatggcgcaacagtttgatatatctgacaaaatgagagcaatacttattgactggctcatcgaggtacatgataagtttgagctgatgaacgagacattgtttctaacagtcaatctgatagatagattcttgtccaagcaagctgttgcaagaaagaagcttcagcttgttggtttagttgcattgctcttagcttgcaagtacgaagaggtttcagtacctattgttgaagatttggtagtcatttcggacaaagcttatacgaggaccgatgttttagaaatggagaagattatgcttagtactttgcaattcaatatgtcgttaccaacgcaataccctttcttgaagaggttcctcaaggcagctcaatcagacaagaagcttgagatcttggcgtcgttcttgattgagcttgctcttgtggactacgaaatggttcggtatccaccatcgttactcgccgccactgccgtgtacacagctcaatgtacaatccatggcttcagtgaatggaacagcacttgtgaattccattgtcactactctgagaatcaactcctagaatgttgtagaagaatggtgagactacatcagaaagctgggactgataaactaacaggagtacatagaaaatacagctcctccaaattcggatacatagcaacaaagtatgaagctgcacactttcttgtgtcagattctcactaa

SEQ ID NO: 7200 - protein, 429 aa, Arabidopsis thaliana
MVNPEENNRNLVVKPITEILQDDDKRSRKFGVEMKRQNRRALGVINHNLVGAKAYPCVVNKRRGLSQRKQESCDKKKLDSLHPSISRSQEETKKLKPSGNEFGDCIFIDEEEEKNEEVTLDQPMPMSLEEPYIEFDPMEEEVEMEDMEEEQEEPVLDIDEYDANNSLAAVEYVQDLYDFYRKTERFSCVPLDYMAQQFDISDKMRAILIDWLIEVHDKFELMNETLFLTVNLIDRFLSKQAVARKKLQLVGLVALLLACKYEEVSVPIVEDLVVISDKAYTRTDVLEMEKIMLSTLQFNMSLPTQYPFLKRFLKAAQSDKKLEILASFLIELALVDYEMVRYPPSLLAATAVYTAQCTIHGFSEWNSTCEFHCHYSENQLLECCRRMVRLHQKAGTDKLTGVHRKYSSSKFGYIATKYEAAHFLVSDSH

SEQ ID NO: 7201 - DNA, 1338 bp, Arabidopsis thaliana
  CDS (1)..(1338)
atggcgacgagagcaaacgtacctgaacaagtcagaggtgctcctctcgttgatggtttgaagattcagaacaaaaacggtgctgtgaagagtcggcgtgccctcggtgacatcggaaatcttgtttctgttcccggagttcaaggaggaaaggctcaacctccgattaatcgacccattactcgaagtttccgtgcccagttattagcgaatgcccaactcgaaagaaagccaatcaatggagacaacaaggttccagctcttggtccaaagagacaacctcttgctgcaagaaacccagaagctcaaagggcggttcagaagaagaatctagtggttaagcaacagacgaagcctgttgaagtgatcgagacgaagaaggaggtgactaaaaaggaagtagcgatgtcacctaagaataagaaagtgacgtactcgtctgtacttagtgctcggagcaaagctgcttgtggtatagtcaacaaaccaaagattatcgatattgatgaatctgacaaagataaccatttggctgcggtggagtatgttgatgatatgtactcgttctataaagaagttgagaaggagagtcagcctaagatgtacatgcacattcagactgaaatgaatgagaagatgagagcgatcttgattgattggttactagaagttcacatcaagtttgagctcaaccttgaaactctgtacctcaccgtcaacatcattgatcgattcctctctgtgaaagctgtccctaaaagagagttacagctagtgggaatcagtgccttgcttattgcttccaaatatgaagaaatctggccacctcaggttaacgatctggtgtatgtcacggacaatgcttacagtagcagacagattctggtgatggagaaggcaattcttggaaacctcgaatggtatttgacagtcccgactcaatacgtcttccttgtccgcttcatcaaagcttcgatgtctgatccagaaatggagaatatggttcacttccttgctgaattggggatgatgcattacgacaccttgacgttctgtccctccatgcttgctgcttcagctgtttacacggcaagatgctcattgaacaagtcccctgcttggactgatacattgcagttccacaccggctacacagagtctgagattatggactgctcaaagcttttagcttttcttcactcgagatgcggtgagagcaggctacgtgcagtgtacaagaagtactcgaaggcagagaatggaggtgttgctatggtttctccggccaagtctctcttgagtgctgctgctgattggaagaagcctgtttcttcttag

SEQ ID NO: 7202 - protein, 445 aa, Arabidopsis thaliana
MATRANVPEQVRGAPLVDGLKIQNKNGAVKSRRALGDIGNLVSVPGVQGGKAQPPINRPITRSFRAQLLANAQLERKPINGDNKVPALGPKRQPLAARNPEAQRAVQKKNLVVKQQTKPVEVIETKKEVTKKEVAMSPKNKKVTYSSVLSARSKAACGIVNKPKIIDIDESDKDNHLAAVEYVDDMYSFYKEVEKESQPKMYMHIQTEMNEKMRAILIDWLLEVHIKFELNLETLYLTVNIIDRFLSVKAVPKRELQLVGISALLIASKYEEIWPPQVNDLVYVTDNAYSSRQILVMEKAILGNLEWYLTVPTQYVFLVRFIKASMSDPEMENMVHFLAELGMMHYDTLTFCPSMLAASAVYTARCSLNKSPAWTDTLQFHTGYTESEIMDCSKLLAFLHSRCGESRLRAVYKKYSKAENGGVAMVSPAKSLLSAAADWKKPVSS

SEQ ID NO: 7203 - DNA, 1068 bp, Arabidopsis thaliana
  CDS (1)..(1068)
atggccgacgaaaaagagaactgcgtgagaatgacaagagcagcaacaaaaagaaaagcttccatggaagcggcaatagacaaagaacgaatcaacaagaagagagtcgtactcggagagcttccaaacttgtccaacatcaagaaatctcgaaaagccactacaaaacagaagaagaaatcagtttcgattccgacaatcgaaaccttaaattcagacattgacacaagatctgatgatccacaaatgtgtggtccttatgttacatcaatcttcgagtatcttcgtcaattagaggtaaagtcaagacctttggttgattatatagagaagattcagaaagatgtaacttcgaatatgagaggagttttggttgattggttagtagaagttgctgaagaatacaaacttctctcagacactctttacctcgctgtttcttacattgatagattcttgtctctcaagactgttaataaacaaaggcttcagcttttgggagttacttcaatgcttattgcttcaaagtatgaagagattactcctccaaatgtggatgacttttgttatatcacagacaatacttacacgaaacaagagattgttaagatggaagctgatatacttcttgcgttgcaatttgaattaggaaaccctacaagcaacacgtttctaagacggtttacaagggttgcacaagaagatttcgaaatgtcacatttacagatggagtttctttgtagctatctttcggagttgagcatgttagactatcaatctgtgaagtttcttccgtctactgtggctgcttcagcggtgtttctcgctaggttcatcatccgtccaaaacaacatccctggaatgtgatgttggaagaatacacaagatacaaagcgggtgatttgaaagaatgtgtggctatgatacatgacttgtatctgagtagaaaatgtggagctttagaagctataagagagaaatacaagcagcataagttcaagtgtgtagcgacaatgcctgtatcaccagagctgcctcttacggtttttgaagatgtcaacatttag

SEQ ID NO: 7204 - protein, 355 aa, Arabidopsis thaliana
MADEKENCVRMTRAATKRKASMEAAIDKERINKKRVVLGELPNLSNIKKSRKATTKQKKKSVSIPTIETLNSDIDTRSDDPQMCGPYVTSIFEYLRQLEVKSRPLVDYIEKIQKDVTSNMRGVLVDWLVEVAEEYKLLSDTLYLAVSYIDRFLSLKTVNKQRLQLLGVTSMLIASKYEEITPPNVDDFCYITDNTYTKQEIVKMEADILLALQFELGNPTSNTFLRRFTRVAQEDFEMSHLQMEFLCSYLSELSMLDYQSVKFLPSTVAASAVFLARFIIRPKQHPWNVMLEEYTRYKAGDLKECVAMIHDLYLSRKCGALEAIREKYKQHKFKCVATMPVSPELPLTVFEDVNI

SEQ ID NO: 7205 - DNA, 1119 bp, Arabidopsis thaliana
  CDS (1)..(1119)
atgacagagcaagagatctgcgtgagggttacaagagcggcggcgaaacgaaaagcttcgacggcgatgggtattgacggagatcgggtcaacaagaagagagttgttctcggtgagcttctaaacgtctccaatgtcaatctcttggctaatctcaatcagaagaaagaaacccagaagccaaaaaggaatcttaaacctcctccggcgaaacagattaagtcagctccggtggctattattgacctagaatcaaaatctgacattgattctcgatctgatgatcctcaaatgtgtggaccttatgttgctgatatctatgagtatcttcgtcaacttgaggtgaagccaaagcagagacctttaccagattacatagagaaagttcagaaagatgtaacaccaagtatgagaggtgttttggttgattggttagtggaagttgctgaagagtataaacttggatctgaaacactttatctcactgtctcacatattgatagattcttgtctttaaagactgttaacaagcaaaagctacagcttgttggagtttctgctatgcttattgcttcgaagtatgaagagataagtcctcctaaagtggatgatttttgttacattacggataatacgttttcgaaacaagatgttgtgaagatggaagctgatatacttcttgctcttcagtttgagttgggaagaccaacgattaatacttttatgagacggtttactagagttgcacaagacgatttcaaagttccacatttgcagctagagcctctttgttgctatttgtcagaattgagtatattagattataagactgtgaagtttgtgccgtctctgttggctgcttctgctgtttttctcgctcggttcatcatccgtccgaaacaacatccttggaaccaaatgttagaagagtacacaaagtacaaagcggctgatctacaagtgtgtgttggaatcatacatgacttgtatttgagcagaagaggaggtgctttacaagctgttagagagaaatataagcaccataagttccaatgcgttgcgaccatgcctgtttcaccagagctgccggttaccttttgggaggatgttaccatttga

SEQ ID NO: 7206 - protein, 372 aa, Arabidopsis thaliana
MTEQEICVRVTRAAAKRKASTAMGIDGDRVNKKRVVLGELLNVSNVNLLANLNQKKETQKPKRNLKPPPAKQIKSAPVAIIDLESKSDIDSRSDDPQMCGPYVADIYEYLRQLEVKPKQRPLPDYIEKVQKDVTPSMRGVLVDWLVEVAEEYKLGSETLYLTVSHIDRFLSLKTVNKQKLQLVGVSAMLIASKYEEISPPKVDDFCYITDNTFSKQDVVKMEADILLALQFELGRPTINTFMRRFTRVAQDDFKVPHLQLEPLCCYLSELSILDYKTVKFVPSLLAASAVFLARFIIRPKQHPWNQMLEEYTKYKAADLQVCVGIIHDLYLSRRGGALQAVREKYKHHKFQCVATMPVSPELPVTFWEDVTI

SEQ ID NO: 7207 - DNA, 1197 bp, Danio rerio
  CDS (1)..(1197)
atgatggctctccgtgtcacaaggaacactcgcctggccagcagcgagaatcagaacgctctgcccggaaaagcagttgtagcgaacaagcccggactcagaccaagggccgcgctgggggagattggcaacaatccgcaaacacgacaggctttgaagaagaaggaggtgaaggttgcacccgccgccgaggttgtggttgagaaggcacctgtggttcaacagcccaagaaggattctcctaaggttcaacatggcgttaaggttgtgtctgagccttcctctcctgttcctatggagacctccggctgtgcttcagatgatctgtgtcaagcattctctgatgttctgcttaatatcaaggatgttgacgcagatgattatgataatcccatgctttgcagtgaatatgtcaaggacatctatttgtatttgcgccagcttgagactgaacaagctgtaaggccaaaatatctggcaggaaaggaagttactgggaacatgcgtgccattcttatcgactggcttgtgcaagtccagattaagtttaggctgcttcaggagaccatgtacatgactgttgccatcatcgatcgcttccttcaggatcatccagttccaaagaagcagctgcaacttgttggtgtaacggccatgttcatcgcctcaaaatatgaagaaatgtacccaccagagattgcagactttgcttttgtgacagaccgtgcatacaccaccagtcagatccgggagatggagatgaaggtcctgagagtcctcaactttggttttggaaggcctctaccactacagtttctcaggagggcctccaagattggagatgtgactgcagaacatcacacattagcgaaatatttcctggagctcaccatggtcgattatgacatggtccactaccctccctctcagatggccagtgctgcttatgccctgaccctgaaggtcttcaactgtggtgactggacccctactcttcagcactacatgggctacactgaagatgagctggttcctgtgatgcagcatattgccaaaaatgttgtgagggtcaacgagggcctttctaagcatctggctgtgaagaataagtactccagtcagaagcagatgagaatcgctacaatttctcagctcaagtcctccttgatcaaagacctggctaagcagatctcatag

SEQ ID NO: 7208 - protein, 398 aa, Danio rerio
MMALRVTRNTRLASSENQNALPGKAVVANKPGLRPRAALGEIGNNPQTRQALKKKEVKVAPAAEVVVEKAPVVQQPKKDSPKVQHGVKVVSEPSSPVPMETSGCASDDLCQAFSDVLLNIKDVDADDYDNPMLCSEYVKDIYLYLRQLETEQAVRPKYLAGKEVTGNMRAILIDWLVQVQIKFRLLQETMYMTVAIIDRFLQDHPVPKKQLQLVGVTAMFIASKYEEMYPPEIADFAFVTDRAYTTSQIREMEMKVLRVLNFGFGRPLPLQFLRRASKIGDVTAEHHTLAKYFLELTMVDYDMVHYPPSQMASAAYALTLKVFNCGDWTPTLQHYMGYTEDELVPVMQHIAKNVVRVNEGLSKHLAVKNKYSSQKQMRIATISQLKSSLIKDLAKQIS

SEQ ID NO: 7209 - DNA, 1209 bp, Schizosaccharomyces pombe 972h-
  CDS (1)..(1209)
atgaactctaacaacaaaagagttgcgcttcaagaaataagcaattatgtttccaaatcattgaacgtaaaaggctgggtgaacgcacaggtacgagaaatatcccttcaaaatgggtgtagcccatcagataaacattttccgtcacagagctggcatggaattagttcaattgaagagtcgcaaatacaaaaggactatgatagttttttagcgtcacctttagaggaagagatagtctttacggagaaacagcttttggtagatttggatgtttgctcgatcagtaacgttcaaagtcctaattgcagtgtttcggaatttggcatagcgattgaagaatcaaatgacaattgtgcagaggaggatgaagaggaggaattacagatgagatattcagcagatgaatcggtgtctgtggaatacgcaaaagaaatcctatcgcacatggagaaattggagattcgatttatgcctgattaccgacatatgtcggctcaaccatattatgttacagagatgagggctagtgtgatcaattggattgtgggggtgcatacatgtataaacctgcttccagaatccttattcctatcgatcaatgtattggatagatttctatctctacaaaatgtgccagcatcgaaaatgaaactttgcggcgcaacggcgctgtttattgcttgcaagtatgaagagatccatcctcctacagtgaaagatttggaaatagtgttggagggagaatggataggagaagatatttgcggaatggaaaagtatatgcttatggttcttcaatatcaacttgggtggccggggccagtatcgtttttgaggctattgacgattgtcaacaaatgggagtcgcagctgcgaataatgataaaatattttcttgaagtatcgctagtggaacaaagattttcaagtctaagggcgagtcaattggtagcgacatgcgcctacaccggccaatctatattgcaagaggaaaactggagcaatacgttgcctcaaattacgggatatgattatatgagtttagtttcgtatgtgcatctactgttgaaatgtctagaaaatccgtttgatcaccactatgcgatctattcaaagtatgcaacaccgtatttccatgggattagtcgacaagtgcatgactggattgcgacaaatacgaacttgatggcgatggatggtagttga

SEQ ID NO: 7210 - protein, 402 aa, Schizosaccharomyces pombe 972h-
MNSNNKRVALQEISNYVSKSLNVKGWVNAQVREISLQNGCSPSDKHFPSQSWHGISSIEESQIQKDYDSFLASPLEEEIVFTEKQLLVDLDVCSISNVQSPNCSVSEFGIAIEESNDNCAEEDEEEELQMRYSADESVSVEYAKEILSHMEKLEIRFMPDYRHMSAQPYYVTEMRASVINWIVGVHTCINLLPESLFLSINVLDRFLSLQNVPASKMKLCGATALFIACKYEEIHPPTVKDLEIVLEGEWIGEDICGMEKYMLMVLQYQLGWPGPVSFLRLLTIVNKWESQLRIMIKYFLEVSLVEQRFSSLRASQLVATCAYTGQSILQEENWSNTLPQITGYDYMSLVSYVHLLLKCLENPFDHHYAIYSKYATPYFHGISRQVHDWIATNTNLMAMDGS

SEQ ID NO: 7211 - DNA, 903 bp, Encephalitozoon cuniculi GB-M1
  CDS (1)..(903)
atggtggtctcgttcaggaaatcagagcctttgaagaatgtgacaaacaagatcggaaggagagccgaaaagacagtcctccctctcacgaagatggaggaaattgtttacaagcagcagagggttggagaggcctcccagatagtgatggtggacaagtactcggatgatgttttcgagtacttctcaacaatcgataaacctttcgtatatatcaacgacggagtgtcgtggaagatgaggagcctcttagtagactggatcatcgacatccatgacaagctgggactctgccacgacactcttttccttgcaatcaacttcattgacaggttcctttccatgaggtcgattcctagctcgaagctccagcttgtcgggatttccgccctgatgatagcatgcaagtatgaggaggttgtgtgcccagctcttcagacgcttgttcttctaacagagaagacgttgacgggagaggatgtaaggaaggcggagaagtacatgctccatacccttaactacgatctgcagtatgtgtctcctctgaatttcctgaggaaatgctccaaggccaacaactacgagatctgcagtaggacagtcggaaagtatttattagaactcatgaccctctacgaggagttcctaagattcaaaggatccgtgagggctgcagcagcaatgtatctcgcaagaaagataacgtcccaggatcaatgcaagaacctctttatcatgtactccggacatactaaagatgacataaaggaatgcttcaatgcccttgtccacaccataagcgagagcattccattcgaaaacatacagaacaaatacaatacccccaagttccttcatgcagcatcctttgtcaaggagtatgcagagaaaaacttcaagtaa

SEQ ID NO: 7212 - protein, 300 aa, Encephalitozoon cuniculi GB-M1
MVVSFRKSEPLKNVTNKIGRRAEKTVLPLTKMEEIVYKQQRVGEASQIVMVDKYSDDVFEYFSTIDKPFVYINDGVSWKMRSLLVDWIIDIHDKLGLCHDTLFLAINFIDRFLSMRSIPSSKLQLVGISALMIACKYEEVVCPALQTLVLLTEKTLTGEDVRKAEKYMLHTLNYDLQYVSPLNFLRKCSKANNYEICSRTVGKYLLELMTLYEEFLRFKGSVRAAAAMYLARKITSQDQCKNLFIMYSGHTKDDIKECFNALVHTISESIPFENIQNKYNTPKFLHAASFVKEYAEKNFK

SEQ ID NO: 7213 - DNA, 1197 bp, Bos taurus
  CDS (1)..(1197)
atggcgctgctccgacgcccgacggtgtccaccgatttagagaataatgacacgggagttaattctaaacctaaaagtcatgtgactatcaggcgggcagttttagaagaaattggaaatcgggttacaacccgagccatacaagtagctaagaaagcccagaacactaaagtacctgttccacccaccaaaacaacaaatgtcagcaagcacccgaaacctactgcttctgtgaaaccagtgcagatggatgtgttggctccaaagggtccttctcccacacctcaggacatctccatgaaggaggagaacctctgccaagctttttctgatgccttgctctgcaaaattgaggatattgataccgaggactgggagaaccctcagctctgcagtgactacgtaaaggatatctaccagtatctaaggcagcttgaggttctgcagtccataaacccacatttcctagatgggagagacataaacggccgcatgcgtgccatcctggtggactggctggtgcaagtgcactccaagttcaggctgctgcaggaaacgctgtacatgtgtgttgccgtcatggaccgatatttacaggttcagccagtctctcgtaagaagcttcagctggttggcattacggcactgctcttggcttccaagtatgaggaaatgttttctccaaacatcgaagactttgtttacatcactgacaatgcttataccagttctcaaattcgagaaatggaaactctgattttgaaggaactgaaatttgagctgggtcgaccgctgccgctacattttttaaggcgggcgtcgaaagctggggaggtcgatgttgaacagcacactttggccaaatacttgatggagctgactctcgttgactatgacatggtgcactatcacccttccaaggtggcggcagccgcttcctgcctgtcccagaaggttctaggccaaggaaaatggaacttaaagcagcagtattacaccggctacacagagagcgaggtgctggaggtcatgcggcacatggccaaaaacgtcgtgcgtgtcaacgagaacatgaccaagttcaccgccatcaagaataagtatgcaagcagcaaactcctgaagatcagcacgattcctcagttgaactcaaaagccatccaggagcttgcctcacctctgctgggacggtcctag

SEQ ID NO: 7214 - protein, 398 aa, Bos taurus
MALLRRPTVSTDLENNDTGVNSKPKSHVTIRRAVLEEIGNRVTTRAIQVAKKAQNTKVPVPPTKTTNVSKHPKPTASVKPVQMDVLAPKGPSPTPQDISMKEENLCQAFSDALLCKIEDIDTEDWENPQLCSDYVKDIYQYLRQLEVLQSINPHFLDGRDINGRMRAILVDWLVQVHSKFRLLQETLYMCVAVMDRYLQVQPVSRKKLQLVGITALLLASKYEEMFSPNIEDFVYITDNAYTSSQIREMETLILKELKFELGRPLPLHFLRRASKAGEVDVEQHTLAKYLMELTLVDYDMVHYHPSKVAAAASCLSQKVLGQGKWNLKQQYYTGYTESEVLEVMRHMAKNVVRVNENMTKFTAIKNKYASSKLLKISTIPQLNSKAIQELASPLLGRS

SEQ ID NO: 7215 - DNA, 1527 bp, Oryza sativa (japonica cultivar-group)
  CDS (1)..(1527)
atgtcgagcaacctagcagcctcccgccgctcgtcgtcgtcgtcctcggtggcggcggcggcggcggcgaagcgacccgcggtgggggagggaggaggaggaggaggagggaaggcggcagcgggcgccgccgcggcaaagaagcgcgtggcgcttagcaacatcagcaacgtcgccgctggtggtggcgccccagggaaggccggcaatgcgaagttgaatttagctgcctcagctgcaccagtgaagaagggatctttggccagtggccgcaatgtgggcacgaatcgggcctcggcggtgaaatcggcttccgccaagccggctccggccatatcccgccatgagagcgccacacagaaggagtctgttcttcctcctaaagtgcctagcattgtgccgactgctgcactggcacctgtcactgtaccctgcagcagcttcgtctcccctatgcattcaggagattcagtttcggttgacgagacgatgtcgacgtgtgactcaatgaaaagcccagaatttgagtacattgataatggggattcctcctcagttctaggttccttgcagcgaagagcaaacgaaaacctgcgtatctcagaggatagagatgtcgaagaaactaagtggaagaaggatgctccttccccaatggaaatcgaccaaatttgtgatgttgacaataactacgaggatccgcagttgtgtgctactcttgcttctgatatctacatgcacttgcgcgaggctgagaccaggaaacgtccatcaactgattttatggaaacaatccaaaaggatgtaaacccaagcatgagagcgatcctgatagactggcttgtggaagtcgctgaagaatatcgtcttgttcctgatacattatacctgacagttaactacattgatcgttatctttctggcaatgagatcaatcgtcaaagactgcaattacttggagttgcttgtatgcttattgctgcaaaatacgaggagatatgtgcacctcaagtagaagaattctgctatataactgacaacacatacttcagagatgaggttttggaaatggaagcttctgtcctgaattacctgaagtttgaagtgactgcacctacagcaaaatgctttttgaggagatttgtccgtgttgcacaagtatcggatgaggatccagcattgcatcttgagttcctagccaattatgttgctgagctatcactgctggagtacaatctactttcttaccctccttcactagtagcggcatcggctattttcttggccaaattcatactgcagccaacaaagcacccttggaattccacccttgctcactacacacaatacaagtcgtcagagttaagcgactgtgtaaaggcattgcaccgcctttttagcgttggtcccgggagtaaccttcctgcaatcagggagaagtatacccaacataagtacaaatttgtggcgaagaagccctgcccaccctcaataccgaccgaattctttcgcgacgcaacatgctga

SEQ ID NO: 7216 - protein, 508 aa, Oryza sativa (japonica cultivar-group)
MSSNLAASRRSSSSSSVAAAAAAKRPAVGEGGGGGGGKAAAGAAAAKKRVALSNISNVAAGGGAPGKAGNAKLNLAASAAPVKKGSLASGRNVGTNRASAVKSASAKPAPAISRHESATQKESVLPPKVPSIVPTAALAPVTVPCSSFVSPMHSGDSVSVDETMSTCDSMKSPEFEYIDNGDSSSVLGSLQRRANENLRISEDRDVEETKWKKDAPSPMEIDQICDVDNNYEDPQLCATLASDIYMHLREAETRKRPSTDFMETIQKDVNPSMRAILIDWLVEVAEEYRLVPDTLYLTVNYIDRYLSGNEINRQRLQLLGVACMLIAAKYEEICAPQVEEFCYITDNTYFRDEVLEMEASVLNYLKFEVTAPTAKCFLRRFVRVAQVSDEDPALHLEFLANYVAELSLLEYNLLSYPPSLVAASAIFLAKFILQPTKHPWNSTLAHYTQYKSSELSDCVKALHRLFSVGPGSNLPAIREKYTQHKYKFVAKKPCPPSIPTEFFRDATC

SEQ ID NO: 7217 - DNA, 1668 bp, Eremothecium gossypii
  CDS (1)..(1668)
atgtcgagcgtgaacaaggagaactaccgaggcgtaccgagtggtcgcgggatgaagaacccagtgctagctggcgcgaagcgcgccgtcttgaacaacgtcacgaacactactttgtctcaagaggctgcgaactccaatgcgcactctggttccggctacacgaactcgttcgggaaggttttgcggcaggcaaagtcgaaattacagtcggcgagggtcgctggctcattgatcccgcaaatgaagcgggaaggcctcgcgtcaagccaagaggacaaggagaacgttgtgcccactggggtcgcacctgctgccgttgcggcagcagcagcagcggctcaaatggctcccgcgatcgcaaagccgatattgcaaagcatttccgaagagtcgcatcaggagtgccaatcgctcttgaaggacggtggctcagacgaaggtgctagtaccgtgtcgacgaagagctcggacaccgaactggccccttcgtcttccagcagcttacaatcagccccggcgaacagcgaagagcctgtggtgctagagagcggaacgcagcttgtagaacggagaaggccgcagacattaaatacaacgcttacagggtcagtcgcgagtagcagcgattgcactacgagcactggacagctaaccgagagcacggcaggggaactaaccaccactcagaaccagctccgtccaagcgttgctgttgccgagtctaaaaagaagcgccccattagtacgatcgtagaaccagaggagctcaagaagttcaaaatctctgaccagggcaaccaatgtgaatgggaagatcttgatgccgaggacatcaatgacccattcatggtgagcgaatatgtgaacgacattttcgagtacctacacaaattggaagtaatgacactaccgaataggcacgatttgttcaagcatgctaacattcagcaaaatcgcgatatattagttaactggatggttaaaatccacaataagtttgggttactacctgaaacgctatacttagcgttaaacataatggacagatttctcgggaaggagctagttcagctagagaaattacagttggtcggaactgcgtgtctatttattgcatcaaagtacgaggaggtgtacagtccgagtgttaagcactttgcttatgagacagatggggcctgtgacgaagaagagattaaagaaggagaaaaattcatactaaagacactacagtttaatttaaattatccaaaccctatgaacttcttgaggagaatttctaaggcagacgattatgatattcagtcaagaacactagctaaatacctattggagatttctgttgttgactttaagtttattgggattctgccctccttatgtgctgctgcatccatgtttctatccagaaaaatgttaggtaagggaaaatgggatgggaacttgatacattacagtggtggatattcgactacagaattggcacctatttgtaacatgttaatggattatcttgtccaaccggtggtccacgacgaattatttaagaaatacgcgagtaggcgtttcatgaaggcatcagtaatatccagacagtgggccaagaaggttatgaccagaagttacgatattatgactttacatgagacacaaactgaatattga

SEQ ID NO: 7218 - protein, 555 aa, Eremothecium gossypii
MSSVNKENYRGVPSGRGMKNPVLAGAKRAVLNNVTNTTLSQEAANSNAHSGSGYTNSFGKVLRQAKSKLQSARVAGSLIPQMKREGLASSQEDKENVVPTGVAPAAVAAAAAAAQMAPAIAKPILQSISEESHQECQSLLKDGGSDEGASTVSTKSSDTELAPSSSSSLQSAPANSEEPVVLESGTQLVERRRPQTLNTTLTGSVASSSDCTTSTGQLTESTAGELTTTQNQLRPSVAVAESKKKRPISTIVEPEELKKFKISDQGNQCEWEDLDAEDINDPFMVSEYVNDIFEYLHKLEVMTLPNRHDLFKHANIQQNRDILVNWMVKIHNKFGLLPETLYLALNIMDRFLGKELVQLEKLQLVGTACLFIASKYEEVYSPSVKHFAYETDGACDEEEIKEGEKFILKTLQFNLNYPNPMNFLRRISKADDYDIQSRTLAKYLLEISVVDFKFIGILPSLCAAASMFLSRKMLGKGKWDGNLIHYSGGYSTTELAPICNMLMDYLVQPVVHDELFKKYASRRFMKASVISRQWAKKVMTRSYDIMTLHETQTEY

SEQ ID NO: 7219 - DNA, 1215 bp, Eremothecium gossypii
  CDS (1)..(1215)
atgagtccggtaggggaaaccagaagagtgtcggacgagaacgaagcagccggggcgcggcggcgcggggagctagcgaagaagcgcggcaacacggtgctgggggtgccgcgcaaggcgctcggagcagtgggcgtgaacacgcggaagcaggagcgcgacggggcggcgacggggagcggcgcgggtggggcgcggggcgcggggacgaagcggatggtgtaccacgatagcgagggggaggagacacaagagccggaggaaaagcgcgtgagcaagaaggcgaaggcggagcggcagtgcccgtcgccggcggcgcagacggagagccctgaggcggcgcgcggcgcgctggtgcgggagccgcacccgcaccgggaccttgacgcgctggaggcggacgatctgacgatgtgcgtcgactacacgaacgagatcttcgcgcacctcttgcagcgggagcaggagacaacgtgcgtggtgaactacgtgcaggaacggcagtgcgcgttttacatccggccgtccatgcgggcgattcttgtggactggctgatagaggtgcacctgaagttccagctgctgccggaggcgctctacttagcgatcaacatcatggaccgctacctctcgacgaacaaggtgtcgctctccaaactacagctcgtggcgatcacgtcacttctaattgcggccaagttcgaggaggtaaacttgccgaaattgtctaactatgtctacatcacggataacgcgtacacagtggaggaggtgaagcagtcggagtgcaacatcctcaacgcgttagagttcaacattggctggccaaacccgatgaatttccttcggagaatctccaaggcagacaactacaatcacaatactcgcaactacgccaaggtcttcctagagtatgcaatgtgctgtccaaagttcgtggccatcactccgtccgttcttgcggccatgtccatgcgctgcgccatgatgctcaactacggtgccgagggtttcgagtgggacgacactatggagtggtacagctccatggctacgacctccgcgaagttcgatttccaaaagttatgtgatgacctcataaaggatattcaggagccgagtacacagttgaatgctctcatctacaagtacaaaaaactggggctttgggttgccgtgaaaacctggtgtgatgaacaaaagattgtgagatag

SEQ ID NO: 7220 - protein, 404 aa, Eremothecium gossypii
MSPVGETRRVSDENEAAGARRRGELAKKRGNTVLGVPRKALGAVGVNTRKQERDGAATGSGAGGARGAGTKRMVYHDSEGEETQEPEEKRVSKKAKAERQCPSPAAQTESPEAARGALVREPHPHRDLDALEADDLTMCVDYTNEIFAHLLQREQETTCVVNYVQERQCAFYIRPSMRAILVDWLIEVHLKFQLLPEALYLAINIMDRYLSTNKVSLSKLQLVAITSLLIAAKFEEVNLPKLSNYVYITDNAYTVEEVKQSECNILNALEFNIGWPNPMNFLRRISKADNYNHNTRNYAKVFLEYAMCCPKFVAITPSVLAAMSMRCAMMLNYGAEGFEWDDTMEWYSSMATTSAKFDFQKLCDDLIKDIQEPSTQLNALIYKYKKLGLWVAVKTWCDEQKIVR

SEQ ID NO: 7221 - DNA, 1128 bp, Eremothecium gossypii
  CDS (1)..(1128)
atgtacggagccagggcgggaaacgagaacagcggggccggcgcggcaggcagcagggccggccggcgcggtagcggcggcagcggtgggccgcgagtggcgttgggcgacgtgacggcgcaggtgaacaaccgggggccgcgggcgggcggcaaggacgcgcgggcgggcaagccgcagggtgacgcggctgtgcagggcggcgagaatgtggaggagacggtgcgggcggtggggccggtgtgggatgcggcggcggaggcggcggtggcggcagcggcggcggagtacggcggggcgccggacccggcggacgaggacacgtgggacgcggtgatggtggcggagtacgcgccggagatcttcgcgtacttgcgcgggctggaggtgcggtttgcgccggcggcggactacatgcgcgggcagccggagttgcggtgggagtaccgcgcgacgttggtggactggctcgtgcaggtgcactgccggttccagctcctgccggagacgttgtacctcacggtcaacatcatcgaccgctttctcagccggaagacggtgacgctcaaccgcttccagttggtgggcgcggcggcgctcttcatcgcgagcaagtacgaggagatcaactgcccgacgctgcgggagttgctgtacatgttggacaatgcatacacggcggacgaggtgttgaaggccgagcggtacatgatcgacacgttggagtttgagtttggctggccggggccgatgtcgtttctccggcgcgtgagcaaggccgacaactacgagtacgacatacgaaccttggcgaagtacttgttggagaccaccatcatggatccgcgtcttgtcgcggcaccgcccagctggctcgcggcgggcgcatactacctcagcaggatcatcatcgggtacaacacgtggacgcgccagcacgtcttctactcggggtacacggcggagcagctcgtgtcgctcgcgaccgtgatactcgagaactgcaggcacgcggagacgcgccaccaggccatcttcgagaagtactccaagagccgccatcgccgctccgcccaggtggttgctcggtggatcgcgatggcggaggagaacctccagccggcttaa

SEQ ID NO: 7222 - protein, 375 aa, Eremothecium gossypii
MYGARAGNENSGAGAAGSRAGRRGSGGSGGPRVALGDVTAQVNNRGPRAGGKDARAGKPQGDAAVQGGENVEETVRAVGPVWDAAAEAAVAAAAAEYGGAPDPADEDTWDAVMVAEYAPEIFAYLRGLEVRFAPAADYMRGQPELRWEYRATLVDWLVQVHCRFQLLPETLYLTVNIIDRFLSRKTVTLNRFQLVGAAALFIASKYEEINCPTLRELLYMLDNAYTADEVLKAERYMIDTLEFEFGWPGPMSFLRRVSKADNYEYDIRTLAKYLLETTIMDPRLVAAPPSWLAAGAYYLSRIIIGYNTWTRQHVFYSGYTAEQLVSLATVILENCRHAETRHQAIFEKYSKSRHRRSAQVVARWIAMAEENLQPA

SEQ ID NO: 7223 - DNA, 1194 bp, Xenopus tropicalis
  CDS (1)..(1194)
atgtcgctgcgtatcaccagaaacatgatggcaaatgcagaaaacaatgtgaaaaccactgtagctggaaagagggttgttgcaaccaaaccagttttgaggcctcgtacagctttgggagacataggaaacaaggccgagctaaaagttccagcaaaaaaggaactgaagccagcagtaaaagctatcaagaaggtaaaacctgtggacaaagtgttggagcccctgaaagttagagaagagaatgtttgccccaaacctgctcaggttgaacctagctcaccaagcccaatggaaacatctggttgcctccctgatgagctctgccaggccttctctgatgtcttgattcaagttaaagatgttgatgctgatgatgatggcaatccaatgctgtgcagtgaatatgtgaaggacatttactgttacctgaggagcctggagaatgcacaagcagtcagacaaaactacctacatggacaggaagtcacaggcaacatgcgtgccatattgattgactggctggtccaggtgcaaatgaaatttcgtctgctgcaggagactatgttcatgactgttggcataattgatcgctttctgcaggaccatccagttcctaaaaaccaactgcagcttgtgggggtcacagctatgttccttgctgctaaatatgaagagatgtacccaccagaaatcggagactttacatttgtaactgatcacacatacacaaaggctcaaattagggacatggaaatgaaggtgcttcgggtgcttaagtttgcaataggccgaccattacctctgcactttcttcggagagcttctaagattggagaggtgactgctgaacagcacagtttggctaaatatttaatggaacttgtaatggtggattatgatatggtgcattactcgccttcccaaatagcagctgctgcctcttgcttgtctcttaaaatcttgaatacgggtgaatggacaccaacaatgcatcattatatggcttactttgaagatgatcttgtccctgttatgcaacatatggccaagaacatcattaaggtgaacaagggactgaccaaacacctgactgttaagaacaaatatgccagcagcaaacaaatgaagatcagcatgatcccccagctgagatcagatgttgttgtggaattggcccgcccactcatgtga

SEQ ID NO: 7224 - protein, 397 aa, Xenopus tropicalis
MSLRITRNMMANAENNVKTTVAGKRVVATKPVLRPRTALGDIGNKAELKVPAKKELKPAVKAIKKVKPVDKVLEPLKVREENVCPKPAQVEPSSPSPMETSGCLPDELCQAFSDVLIQVKDVDADDDGNPMLCSEYVKDIYCYLRSLENAQAVRQNYLHGQEVTGNMRAILIDWLVQVQMKFRLLQETMFMTVGIIDRFLQDHPVPKNQLQLVGVTAMFLAAKYEEMYPPEIGDFTFVTDHTYTKAQIRDMEMKVLRVLKFAIGRPLPLHFLRRASKIGEVTAEQHSLAKYLMELVMVDYDMVHYSPSQIAAAASCLSLKILNTGEWTPTMHHYMAYFEDDLVPVMQHMAKNIIKVNKGLTKHLTVKNKYASSKQMKISMIPQLRSDVVVELARPLM

SEQ ID NO: 7225 - DNA, 1173 bp, Danio rerio
  CDS (1)..(1173)
atgtcttcgcgcagttttgctcctctttccagtcgtcaggagaacattttaggaagagcggaaggcctgcgccagctcaagcccggccaaagagttgtgcttggtgttttgaccgagaatgatcagcataatcgaatatttggacaggttgcgtccaaatatgaaccaacgcaccaggaggtgtctacgcgtgacgtcagcacgttcagagcgtcaattggtgatcgtgtgattgagacagccactgtacagtcagtcaagtcaacattcctgctgccttcagaactgctagtactcaacgatgctgttcaagatattggctcagggtcatttatggattcatccatgcattcattggctgatgaagaagctgcttcctctgaggacgtcttgtgtgtttctgaatatgctgaggacatccacagatacctgcgtgaatgcgaagttaaatacagaccaaaacctggctatatgagaaagcagcctgacataaccaactgcatgagggtcattcttgtggactggctggtggaagttggcgaagaatacaagctgtgctctgagaccctgtacctggctgtcaattacctggaccgctttctttcgtgcatgtctgtcctgagaggaaaactgcagcttgtggggacggctgcaatactcctggctgccaaatacgaggaagtgtatcctccagaggtggatgagtttgtctacatcacggatgacacctatacaaagaaacagctgcttcggatggagcagcacctgctccgagtgcttgcgtttgacatgaccgctcccacaatccaccagtttctgatgcagtacagtttggaggagcatgtctgcgccagaactctaaacctcgctctgtatctctcagaactgagcttgcttgaggtggatccttttgtgcaatatctgccatccaagaccgctgctgcagcatattgtctggccaactacactctaaatggggctttgtggcctgagaatctgtatgcctttactggttactctctggctgtgattggcccgtgtttgaaagagcttcataagctccatctcggggctggaagtcgccctcaacaggccatccaggagaagtacaagagctcgaaatatcatggagtgtcccagttggaacctgtagagactctgccgctgccctga

SEQ ID NO: 7226 - protein, 390 aa, Danio rerio
MSSRSFAPLSSRQENILGRAEGLRQLKPGQRVVLGVLTENDQHNRIFGQVASKYEPTHQEVSTRDVSTFRASIGDRVIETATVQSVKSTFLLPSELLVLNDAVQDIGSGSFMDSSMHSLADEEAASSEDVLCVSEYAEDIHRYLRECEVKYRPKPGYMRKQPDITNCMRVILVDWLVEVGEEYKLCSETLYLAVNYLDRFLSCMSVLRGKLQLVGTAAILLAAKYEEVYPPEVDEFVYITDDTYTKKQLLRMEQHLLRVLAFDMTAPTIHQFLMQYSLEEHVCARTLNLALYLSELSLLEVDPFVQYLPSKTAAAAYCLANYTLNGALWPENLYAFTGYSLAVIGPCLKELHKLHLGAGSRPQQAIQEKYKSSKYHGVSQLEPVETLPLP

SEQ ID NO: 7227 - DNA, 1968 bp, Magnaporthe grisea 70-15
  CDS (1)..(1968)
atggacgcaaggccacaacgtccctcccgtgctggagccctccagccgtctggcaacgagaacattgcaccggtcaaacaagttttgcatcagcgtcataagtcggccgggaatctgaagaccatctacaacccagctactgcgttcccggcaggtggtctcaacgttgcaccaaagcgagctgtcttcggcgagatgaacacgaacgccaagagcgcagctcaggatctgccctcaaagaaggcatccatggctccagtggtttcccatgtgggcaaggagaactctggtaaaccagcagctttgcaaaagcctgcacaacgatcgagtaaaagctacgcgatgctgcaccagcagccatccgcagctgatacccacggcgctgcacttcgcaaggccacggccgatgtactcactaagcctcaagtgaccaagaagaccactttcgtataccaagacacgactgctgcacaactcctgcccgagccgaatcagcatatgattgctgatcacccagtaatactcccaaagcccgacataatcaagaatccccgccattacaaaagccagcctcaacttaagccgaatcagcccgtcctccgccgaactcttagcagacagttcgccgaggtggcgagcttgatctcgtcagctctggcggaagaggcccaagatccaccatatgaggatgcgttggaagagattgccgacatcaatgggtcaaggggcgttccaatcaacatactaggtgactacatggaggagccaaacattgagattatctcgcatgatgctatagatgactaccccttggaggagcacgtcccagcaccgccaaccgcattcgagtccgaagacgggtgggaggaggaggacggcgatatggatgacgagcaaggttataccactgcccattcttaccgatcccatggcgaaaacaccacgggggggctcactgaactcctggcccccaaggcaacggccagagtgcaacaggaactggagcaggccaaagcaatcgtcgaggagtcgaggactattgaagaaatcgaagaggagcaatgggatgtcagcatggtggcagagtatggagaagagatctttgagtacatgcgcgagctcgagacccgtatgactcccgaccctcactacatggacatccaaacagagatacagtggtccatgcgctcagtcctgatcgattgggtcgttcaggttcaccaccgattcacgctcctccccgaaactctcttcctatgtgtcaactacatcgaccggttcctgtcacagaaggtcgtttccgttgccaagttgcaacttgtcggagccacggccatattcatcgcggccaagtacgaggagatcaactgcccctcggtcaatgagataatattcatggtcgacaacggcttctctgccgatgagattctcaaggctgagcgttttatgctcagcatgttacaattcgagcttgggtggcccggtcccatgagcttcttgcgccgaatcagcaaggccgatgactacgacctggagaccaggactctggcgaagtacttcctcgaagttactatcatggacgagagatttgttggctgcccgccaagcttcctggcagctggagcacactgcctctctcgaatgattcttgagaagggtgactgggcccacacctactggtcgggctacacctggtctcagctcaggccactggtggcgttgctatttgactgctgccagtaccccgagaagcaccatcaagccgtgtttgaaaagtactgcgaccgccgctataagggtgcgtcaacgtttgtccagagggccatcgcgcgcggctggacgccgcctttccccatccagcagccattcgttttggacgcaaactgcttcgcagagaccattgcctcatgcaggaacttctcttcaatggaagtgggacgcatgatggccaccgcgacgcaagcataa

SEQ ID NO: 7228 - protein, 655 aa, Magnaporthe grisea 70-15
MDARPQRPSRAGALQPSGNENIAPVKQVLHQRHKSAGNLKTIYNPATAFPAGGLNVAPKRAVFGEMNTNAKSAAQDLPSKKASMAPVVSHVGKENSGKPAALQKPAQRSSKSYAMLHQQPSAADTHGAALRKATADVLTKPQVTKKTTFVYQDTTAAQLLPEPNQHMIADHPVILPKPDIIKNPRHYKSQPQLKPNQPVLRRTLSRQFAEVASLISSALAEEAQDPPYEDALEEIADINGSRGVPINILGDYMEEPNIEIISHDAIDDYPLEEHVPAPPTAFESEDGWEEEDGDMDDEQGYTTAHSYRSHGENTTGGLTELLAPKATARVQQELEQAKAIVEESRTIEEIEEEQWDVSMVAEYGEEIFEYMRELETRMTPDPHYMDIQTEIQWSMRSVLIDWVVQVHHRFTLLPETLFLCVNYIDRFLSQKVVSVAKLQLVGATAIFIAAKYEEINCPSVNEIIFMVDNGFSADEILKAERFMLSMLQFELGWPGPMSFLRRISKADDYDLETRTLAKYFLEVTIMDERFVGCPPSFLAAGAHCLSRMILEKGDWAHTYWSGYTWSQLRPLVALLFDCCQYPEKHHQAVFEKYCDRRYKGASTFVQRAIARGWTPPFPIQQPFVLDANCFAETIASCRNFSSMEVGRMMATATQA

SEQ ID NO: 7229 - DNA, 1902 bp, Gibberella zeae PH-1
  CDS (1)..(1902)
atggacgccaagccttttagaccgcgcggcgccgaaaatgcacctcatcttcaacaacaacacaagtcaacgggaaatctggccaacatggccaagtccaccacagcagctgggttccgtgggcctgctaagcgagcagcgttcggcgatgtgaccaacgttagcaagcaaatcggacacactcgtgatgacggcaaatcaatcaaagtctacgctacgaatggtgtcagtcatggacttacaggcgtgcccgtgagcaaagagaacggtgcctacggcaaggaagccttctcccgtcccgctcaaagaatcgccaaccaagcatcaacacgaaccgcactcgaaaacaaaaactttgacgcgaacaagaagccttatgtgaggaaggatggccacgttgccaccaaacctcctgctccttcttcggtccagaatgcgccttccctccaacccagacatcacaagagtcagcctcagctcaagcctcaacagcagccgaacagtctacggcgcacacagagcaagcagctcgacaaggtcgtgcccaagccagatgccgatacgggccacaaggcgacgaatcctgcgggattccagcttcaggagacagaatatccctatgaccacgctgcgtatcttgactccatgtatctgcctattgaagctggtgccccccttgatgtgctccaaaaggaggagtacccggagctacctgccaaacttcccgaaatttctgaagatgatgctgccatccattctttcgaagaagcccacatgcccgccatgtcagaacctgaagaatgctgggaagaggatgaggatgaggattatgacgaccaggaccaagcatacacaacagcgcactcggttcgttcccgagatatgactgctggtggtgctacagagattgatcctctaccgcgtgtaacagcgcgagtccagcgcgaactcgaagacgcccgtgaggaggtggagcgaactcgcactacagacgagatcgaagaggagatgtgggatgttagcatggttgccgagtatggcgacgagatttttgagtatatgcgcgagctcgagatcaagatgctccccaacgcccattatatggatgaccagaccgagattcaatggtcaatgcgatctgttcttatggattggcttgtgcaggtccataaccgtttcggtctcttacctgaaactcttttcctgactgtcaactatatcgaccgtttcctttcccagaagatcgtgtcgattggcaagcttcaactcgtcggcgcgacagccatcttggtcgcctccaaatacgaagagattaactgtccttctctaggggagattgtatacatggtcgacaatgggtacaccgcggaagaagtcctcaaggccgagcgctttatgcttagtatgctgagcttcgagctgggctggcctggccccatgagctttttgcgacgcgtcagcaaggctgatgactatgacttggacactcgtactctcgcgaaatatttcctcgagttgaccatcatggacgagcgtttcgtggcttcacccccgagcttccttgctgcgggtgcgcactgcctttcacgactcattctcaagaagggtgactggactaagcagcatgtctactactcgggctatacttggggtcagttgaagagcctggttacgatgatgatcgaatgctgtgatcgtcctcacctacaccatgccgcagtgttcgacaagtacacagaccgtcggtacaaggaagcatctttgttggtgcagtcagcacttgatgccgggttcactcttcctcaccaagtggcacctgttcgtcaagagcttgacgcctaccgtgaagacagtgctgaattgcccattgcgcagcctcagctcattcccatcgagggttga

SEQ ID NO: 7230 - protein, 633 aa, Gibberella zeae PH-1
MDAKPFRPRGAENAPHLQQQHKSTGNLANMAKSTTAAGFRGPAKRAAFGDVTNVSKQIGHTRDDGKSIKVYATNGVSHGLTGVPVSKENGAYGKEAFSRPAQRIANQASTRTALENKNFDANKKPYVRKDGHVATKPPAPSSVQNAPSLQPRHHKSQPQLKPQQQPNSLRRTQSKQLDKVVPKPDADTGHKATNPAGFQLQETEYPYDHAAYLDSMYLPIEAGAPLDVLQKEEYPELPAKLPEISEDDAAIHSFEEAHMPAMSEPEECWEEDEDEDYDDQDQAYTTAHSVRSRDMTAGGATEIDPLPRVTARVQRELEDAREEVERTRTTDEIEEEMWDVSMVAEYGDEIFEYMRELEIKMLPNAHYMDDQTEIQWSMRSVLMDWLVQVHNRFGLLPETLFLTVNYIDRFLSQKIVSIGKLQLVGATAILVASKYEEINCPSLGEIVYMVDNGYTAEEVLKAERFMLSMLSFELGWPGPMSFLRRVSKADDYDLDTRTLAKYFLELTIMDERFVASPPSFLAAGAHCLSRLILKKGDWTKQHVYYSGYTWGQLKSLVTMMIECCDRPHLHHAAVFDKYTDRRYKEASLLVQSALDAGFTLPHQVAPVRQELDAYREDSAELPIAQPQLIPIEG

SEQ ID NO: 7231 - DNA, 1890 bp, Aspergillus nidulans FGSC A4
  CDS (1)..(1890)
atggacgcgaagccccaacgcatccgtgtccgtggtgacgagaatgctccctttcccctcgccgcgaccaagacacttcaccaacgaacgaagtctactactgcattgtccgcaaccttccagaacggtgccagtaagaatggagcccgcagagccgcctttggagatgtcagcaacaccgccagcctagttcacggcaaccgagacgatgcctcccttgctggcaggaaaccatccaaattgctggagaagggatctatggctacggaaaagaagtcgaccgcgctgtcacagcccgcccaacgtcccgtttccatgtcgggtttcaagggcctgctgaacaatgtgaccaaccccaagccccttgaggtcacgaagcaggcagctgggcagcagcaaagcacaaactcccgtaagaccttgaacaagcgcgctacggttttcaaagatcacctagaaccattgacggagagcaaagaacttacatccaaggaatcgaaacccgaacctaaggaaggcaacatgaagggccattcaaaaccaagcttgggggaacatctgcagaaggacggcaaagtggagggtactgtctctttgaatgaaaaattagagagcgaaatgtgcaaactcgaggttctgttgtcccagcctggagccgaagaagacgagaaggagttcccggatcttgaggacgacgattgcaaagtgcaacctatgccgaagcaaaccggcgaagctcatatcgcagcggactccaacggacccgctattagctcgagggtcacttgcaaatccaccacagtctcccgtgcttcacaggatgacttacctcatcagtcggaacctgaagaatactgggacgatgacgatgaggagaacgaggaagacgactatatcactgcccgatcataccgctcccgtagcgagaataccaccggcggagcaacgaccctactgtttcccagatataaccagcaggtcaaacgtgagctggctctcgcaaagcagatagtcgaggctacccgcaccgtggaagatatcgaggacgactattgtgatacaagtatggtggctgaatacagcgaggagattttcgagtacatcagagagcaagagatcaagatgctgccaaatgcacattatatggacaaccaagccgagatccaatggtccatgcggtctgttctcatggactggcttgtgcaggtccaccatcggttctcactgctccctgaaactctttttctttgcgtcaactatatcgaccgtttcctctcatgcaagattgtttcgcttggcaagctgcagcttgttggtgcgactgctatttttatcgccgcgaaatatgaagagatcaactgtccgtctgtccaggagattgtttacatggttgacggcggttacactgtcgatgaaattctgaaagcagagcggttcatgctaagcatgctccagttcgagcttgggtttccaggacctatgagcttccttcgcagaatcagcaaagctgacgattacgacctcgaaactcgcacacttgcgaaatatttcctggaggttactatcatggatgagcgattcgttggtagtcctgctagtttccttgctgccggcgctcattgcttggcgaggttaatgctcaagaaaggcacctggtctcctgctcatgtgcattacgccggttatacttactctcagctatacccgctcgtctctctcattgttgagtgctgtgagatgccccgcaagcatcattcagctatttacgataagtacaacgatagacgattcaagcttgcttctgcttacgtggaagccgaaatgaggaagaacttccgtcttccagagccggctatcgaccgcaaaacaacacttggtcaaggacattag

SEQ ID NO: 7232 - protein, 629 aa, Aspergillus nidulans FGSC A4
MDAKPQRIRVRGDENAPFPLAATKTLHQRTKSTTALSATFQNGASKNGARRAAFGDVSNTASLVHGNRDDASLAGRKPSKLLEKGSMATEKKSTALSQPAQRPVSMSGFKGLLNNVTNPKPLEVTKQAAGQQQSTNSRKTLNKRATVFKDHLEPLTESKELTSKESKPEPKEGNMKGHSKPSLGEHLQKDGKVEGTVSLNEKLESEMCKLEVLLSQPGAEEDEKEFPDLEDDDCKVQPMPKQTGEAHIAADSNGPAISSRVTCKSTTVSRASQDDLPHQSEPEEYWDDDDEENEEDDYITARSYRSRSENTTGGATTLLFPRYNQQVKRELALAKQIVEATRTVEDIEDDYCDTSMVAEYSEEIFEYIREQEIKMLPNAHYMDNQAEIQWSMRSVLMDWLVQVHHRFSLLPETLFLCVNYIDRFLSCKIVSLGKLQLVGATAIFIAAKYEEINCPSVQEIVYMVDGGYTVDEILKAERFMLSMLQFELGFPGPMSFLRRISKADDYDLETRTLAKYFLEVTIMDERFVGSPASFLAAGAHCLARLMLKKGTWSPAHVHYAGYTYSQLYPLVSLIVECCEMPRKHHSAIYDKYNDRRFKLASAYVEAEMRKNFRLPEPAIDRKTTLGQGH

SEQ ID NO: 7233 - DNA, 1401 bp, Candida glabrata CBS138
  CDS (1)..(1401)
atgcagactggaaatgaggagaatgctgttccctcatggtattcagtgcctggtaaggaggtgcatagcgataaggctcatgagcaccgggtggctttgagcgatgtaactgggttggccaacagtaatttcatgcatgaaaagcttcattctaacagatgcagtggtgaaccgtctagcacggcacgtaatagtctcgagataaatctgaatcatgcggtggagtcggatcaggaaaacatggtgtccatatatgcttcgaacactctggacacacccaatagcaacgatgtgagcagccttcttgaagatcaacagctggaaagtatacgaagagtcacccagcacatgtcaaatacatcaaatggcgatgactcggactcaacaacggtggccaataaggactctcaccagggtgataacagtaacaatacaagtgatgatgctctcaggaatgagtattcagaaccaccagtgaatgatgatatacgaaggacattgatgaaagcataccagacatataagttggcatacttggatgattctgacgaggacaactacgatcctgtaatggtggtagaattagcctctgggatatttgattatatgaaacaactggagatcaaataccgtcctgacccttattacatggatttgcaatccgaactaaaaccatcatacagaagtacattactggattggatcgttcaagtagatgagagattccagctactgccagagactttattcctcacgattaacataatagacagatttttgtccaaagccgctataaaactcaacaagtttcaattggtcggtgctgtttcaatgtttatcgctgcaaaatatgaagaaataaactgtccaacaatgaaggactttctttacatgcttgataatgcatatacaaaagaagaaatgatagatgctgaacgatttatactaaacacattggatttttcaataggatggcctggcccaatgtctttcctgcgtcgtataagcaaagctgatgattatgattataacattagaacgttggctaaatacctattagaaacaacaatcatggacgctagactaataggaactccacctagctggctggcatcgggtgcctatttcctaagtaaaaccatcttgagctatggaaatgaagaaagagatgctgaagaaagatcagtttatgagactggctggaccctaaaacatgtcttttattctggctatacccaagagcaagtttttcctttatctagtctgattctcgagaactgtaggcatgcacaagaacgtcatagtgcaatttggacaaagtattccgacaggcgctatcaccgttcctcagtgatggtggataagtggatcgaggttgcagaaagcaaaatgaatagttaa

SEQ ID NO: 7234 - protein, 466 aa, Candida glabrata CBS138
MQTGNEENAVPSWYSVPGKEVHSDKAHEHRVALSDVTGLANSNFMHEKLHSNRCSGEPSSTARNSLEINLNHAVESDQENMVSIYASNTLDTPNSNDVSSLLEDQQLESIRRVTQHMSNTSNGDDSDSTTVANKDSHQGDNSNNTSDDALRNEYSEPPVNDDIRRTLMKAYQTYKLAYLDDSDEDNYDPVMVVELASGIFDYMKQLEIKYRPDPYYMDLQSELKPSYRSTLLDWIVQVDERFQLLPETLFLTINIIDRFLSKAAIKLNKFQLVGAVSMFIAAKYEEINCPTMKDFLYMLDNAYTKEEMIDAERFILNTLDFSIGWPGPMSFLRRISKADDYDYNIRTLAKYLLETTIMDARLIGTPPSWLASGAYFLSKTILSYGNEERDAEERSVYETGWTLKHVFYSGYTQEQVFPLSSLILENCRHAQERHSAIWTKYSDRRYHRSSVMVDKWIEVAESKMNS

SEQ ID NO: 7235 - DNA, 1332 bp, Candida glabrata CBS138
  CDS (1)..(1332)
atgaataatactgaagatatgtttagggacgttgaaaatgcaagccaaaatatggcttcaacagtgaacacttcaagaatggaccaaagacaaagaagggctttgactgatttgacatcacaaaaagtgaacagaattcatacttcaaaaacaattaaggatattccagcatatttatcaaattacactgccgatggagagaataaaaacattgaccaagcttttaatcatagtaatgaccaagatatcggtttagtaaatcaaatcaactcaggatatgccaatgttgaaaacgaaccaggaaaagaaactgatcacatatttatagatcaggatgatctgtcagatttagatattgtacaagaggactccttgagggagcaactagaagaatttgaacacgactttgagaattttgtggagccactctcaccaatatttaatgatgaaatacaagatactcttgatagagcatttaaagaatactatagagcaactccagatatggaggatgatgatacatttgatgctgttatggtaacggagtatggtagtgatatttttcgttacatgagaaagcttgaattaaaatatagaccaaatccgtactacatggcaggccaaccggaattgaaatgggaatatagaaagactgtgattgactggattgtgcaggttcacgagaggttccaattacttcctgaaacactatatctaactattaacatcatcgacagatttttatcaagaaagaatattacacttaacagattccaactagttagtgctactgcattactgatagcatccaaatacgaggaaatcaattgccctactataaaggatatagtctatatggtagacaatacttattccagggatgacatcatagaagctgaaaaatatatgattgatgcactagacttcgaagttagctggccaggtcctatgtcgttcttgcggagaataagtaaagcagatgattatgaataccgaactagaaatctagctaagtatttgctagaaaccacactaatggaatcctctttaatcagtgcactaccaagctggcttgcagctggtgcctactttttaagtagaataatattaggttacgaagagtggacccttaaacatgtctactattcgggctatactcacgaacagctttatcctctggctacacttatcttagacaactgccagaattatgaagaaagccaccaagcaatttggacgaagtatagtcaaccacaatatcatcaagtttcaatactggttacgaagttcttaggtagagtttcttcagacgatatgtcagaaatttattaa

SEQ ID NO: 7236 - protein, 443 aa, Candida glabrata CBS138
MNNTEDMFRDVENASQNMASTVNTSRMDQRQRRALTDLTSQKVNRIHTSKTIKDIPAYLSNYTADGENKNIDQAFNHSNDQDIGLVNQINSGYANVENEPGKETDHIFIDQDDLSDLDIVQEDSLREQLEEFEHDFENFVEPLSPIFNDEIQDTLDRAFKEYYRATPDMEDDDTFDAVMVTEYGSDIFRYMRKLELKYRPNPYYMAGQPELKWEYRKTVIDWIVQVHERFQLLPETLYLTINIIDRFLSRKNITLNRFQLVSATALLIASKYEEINCPTIKDIVYMVDNTYSRDDIIEAEKYMIDALDFEVSWPGPMSFLRRISKADDYEYRTRNLAKYLLETTLMESSLISALPSWLAAGAYFLSRIILGYEEWTLKHVYYSGYTHEQLYPLATLILDNCQNYEESHQAIWTKYSQPQYHQVSILVTKFLGRVSSDDMSEIY

SEQ ID NO: 7237 - DNA, 1335 bp, Kluyveromyces lactis NRRL Y-1140
  CDS (1)..(1335)
atgatgcaaatgcagcaaagggtagcacttggtgatgttacttcacagattaacaatagggccaatcggtttagtgttgacggtgacagcaagaaagcgtttgttgatgctggattcttgaaggagaaaagggtaaagaatgcgaaggagaatgatttgtttagtggtcatgacgatgatttagtagtagcacgggctcaaaaactacgagaacagactcttgtttcttctgtgagtactgagagtatacggtcgcaacaattgtctagcaatagtaacgaaacagtacaacaccatttgattgaggttgaagcagatgatgaggatgatgcggagactgatagtgaggcactagcttttaaagaagatgaagaagcagaaacaggcggagatataagtgaggaaatggaagacgtagatgaaagttttacgccgttagtgccggtggtaacggaacattcagagaggttatatcaatatgtgtatgagaggttacaccgtgaggagcctgaccctaacgatgaggacacatgggaccctgttatggtatcggaatataccattgaaatttttgaacatttgaagtttttggagaggaaattttcgccgaatcccaggtatatcgaacatcaaccggaactaacgtggaaatacagatcaacgttgatcgattggattgttcaagtccacgataggttccagttgttacctgagacgttatttttaacggtaaacattatcgataggtttttatcaaagaaacaagtcactttgaacaggttgcaattagtcggtgcagcagctctattcattgcttccaaatacgaggagatcaactgtccaactttgaaagatatgctgtatatgctggacaatgcatacactagagaagagattctaagggcagaaagattcatgatcaatacgttaaatttcgaatttggatggccaggtccaatgtcatttttaagaagagttagtaaagcggatgattatgaatacgatacaagaaccgtggctaaatatttattggaaacttccataatggagccagaaataatagcagcgccaccatcttggcttgctgcaggtgcatattacttgagtaaaatcattatcggactcacaggttggtctgacgaacacatatattattccggttacacagaagagcaattaataccgttggcaacaatgattttggattcatgcagacatgcaacagaacgtcacaaagcaatattcgataagtactcgaggagtcgccataggaaatctgcttttgtagtagcgaagtggatttcaatggccgagagtcggttggaacagaaataa

SEQ ID NO: 7238 - protein, 444 aa, Kluyveromyces lactis NRRL Y-1140
MMQMQQRVALGDVTSQINNRANRFSVDGDSKKAFVDAGFLKEKRVKNAKENDLFSGHDDDLVVARAQKLREQTLVSSVSTESIRSQQLSSNSNETVQHHLIEVEADDEDDAETDSEALAFKEDEEAETGGDISEEMEDVDESFTPLVPVVTEHSERLYQYVYERLHREEPDPNDEDTWDPVMVSEYTIEIFEHLKFLERKFSPNPRYIEHQPELTWKYRSTLIDWIVQVHDRFQLLPETLFLTVNIIDRFLSKKQVTLNRLQLVGAAALFIASKYEEINCPTLKDMLYMLDNAYTREEILRAERFMINTLNFEFGWPGPMSFLRRVSKADDYEYDTRTVAKYLLETSIMEPEIIAAPPSWLAAGAYYLSKIIIGLTGWSDEHIYYSGYTEEQLIPLATMILDSCRHATERHKAIFDKYSRSRHRKSAFVVAKWISMAESRLEQK

SEQ ID NO: 7239 - DNA, 1422 bp, Debaryomyces hansenii CBS767
  CDS (1)..(1422)
atgaaatcctttaaacaccaaaccaagtcgtttgatgaaaacgcccggatcaagtccaaaagtaacaccagtgcaaaattgatctccaaaaattcaaataataacaatgctaataacatcacctcgagtattgataaaagagaagcacttggcgacttaacgcagcttaatgagaaccggaaaattgatttgaatctgaaaacttctcttcaaaaagttcatatttacaaacaaaaacaccaaaaaagaccacatgaagaattaggtacaaagacagaacttggcacaaacgaacattatgataatagccagaactctgatgatgtacttaagttccattttgatcgtttagggggtagttcagatgtgtccaatcttgaagatattggatttgagtttgctaaccaaaatagaattgtagagcaatttgatgatgacgaagaagagatagttcaggtagatccagaggtggacgaggaagaagaagaagaagaagaagaagaagaagaggaagaggaagattacagcaagccaatggaaccaaaatggaacaaagctatattcaatgaattacaatatgtcatgaagaaattctctaaaaatacgttggatgaaaccgatgaggatacatttgatgttactatggtagcagaatatgcaccagagatttttaactacatgcatgaactagaatacagattggttccagatctgaattatatgagtaaccaggacgaattgaaatgggaaatgagaagtgttttaatcgattgggtggtccaggttcacaatagattcaatttattaccggaaacattattcttaacggtaaattatatcgatagatttttaagtaagcgtaaggtctcgttatcgagatttcaattggtcggagctgttgcattgttcattgctgcaaagtatgaagaaattaactgtccaactgttcaagaagttgcatacatggctgataatgcgtatacagtagatgaattcttaaaagcagagagattcatgattgatgtcttagagtttgatatgggttggcctggtccaatgtcttttttaagaagaactagtaaagctgatgactatgattatgaaactagaacattggctaaatactttttagaaatcacaataatggattcaagatttgtcgcttcacagccaagttggttggcagctggggcacattacttatcaagaaagttacttaatagaggtcactggacagaagctcatgtgtattattctggctataccgaatctcaattaagaccattagcagaaatcttattgcaaaattgtcgtaatgctgaatccaaccataaagccatttttgaaaagtaccaagaacgtcgctacagaagatcctcagcattcgttcaagaatacttcgaagctcttgaacagttataa

SEQ ID NO: 7240 - protein, 473 aa, Debaryomyces hansenii CBS767
MKSFKHQTKSFDENARIKSKSNTSAKLISKNSNNNNANNITSSIDKREALGDLTQLNENRKIDLNLKTSLQKVHIYKQKHQKRPHEELGTKTELGTNEHYDNSQNSDDVLKFHFDRLGGSSDVSNLEDIGFEFANQNRIVEQFDDDEEEIVQVDPEVDEEEEEEEEEEEEEEEDYSKPMEPKWNKAIFNELQYVMKKFSKNTLDETDEDTFDVTMVAEYAPEIFNYMHELEYRLVPDLNYMSNQDELKWEMRSVLIDWVVQVHNRFNLLPETLFLTVNYIDRFLSKRKVSLSRFQLVGAVALFIAAKYEEINCPTVQEVAYMADNAYTVDEFLKAERFMIDVLEFDMGWPGPMSFLRRTSKADDYDYETRTLAKYFLEITIMDSRFVASQPSWLAAGAHYLSRKLLNRGHWTEAHVYYSGYTESQLRPLAEILLQNCRNAESNHKAIFEKYQERRYRRSSAFVQEYFEALEQL

SEQ ID NO: 7241 - DNA, 1122 bp, Oryza sativa (japonica cultivar-group)
  CDS (1)..(1122)
atggccggcaaggagaacgccgcggcggcgcagccccgcctcacccgcgccgccgccaagcgcgcggccgccgtcaccgccgtggccgtcgccgccaagcgcaagcgcgtcgcgctcagcgagctccccacgctgtccaacaacaacgccgtggtgctcaagccgcagccggcgcccaggggcggcaagagggccgcctcccacgccgccgagcccaagaagccagctccgccgccggcgccggcggtggtggtcgtggtcgacgacgacgaggagggggagggggatccgcagctctgcgcgccctacgcctccgacatcaactcctacctccgctccatggaggtgcaagcgaagcggcggccggcggcggactacatcgagacggtgcaggtggacgtgacggccaacatgcgaggcatcctggtcgactggctcgtcgaggtcgccgaggagtacaagctcgtctccgacacgctctacctcaccgtctcctacatcgaccgcttcctctccgccaaatccatcaaccgccagaagctgcagctcctcggcgtctccgccatgctcatcgcctcgaagtatgaggagatcagccccccaaatgtggaggatttctgctatataaccgacaatacctatatgaaacaggaggttgtcaagatggagcgcgatatactgaatgttctcaagtttgagatgggcaatcctacaaccaagacgttcctgaggatgttcatcagatctagccaagaagacgataagtatcctagccttcccttggagttcatgtgtagctatcttgccgagctgagcctgctggagtacggctgtgttcggctcttgccatccgttgttgcagcctcagtggtgtttgttgcaaggctaacccttgattcagacaccaatccttggagcaagaagttgcaagaggtgaccggctacagggcatctgagttgaaggattgcattacctgcatacatgacttgcagctaaacaggaaagggtcatctctaatggctatccgggacaagtacaagcaacataggttcaagggcgtatcaacattgttaccccctgttgagatccctgcatcatacttcgaagacctaaacgagtag

SEQ ID NO: 7242 - protein, 373 aa, Oryza sativa (japonica cultivar-group)
MAGKENAAAAQPRLTRAAAKRAAAVTAVAVAAKRKRVALSELPTLSNNNAVVLKPQPAPRGGKRAASHAAEPKKPAPPPAPAVVVVVDDDEEGEGDPQLCAPYASDINSYLRSMEVQAKRRPAADYIETVQVDVTANMRGILVDWLVEVAEEYKLVSDTLYLTVSYIDRFLSAKSINRQKLQLLGVSAMLIASKYEEISPPNVEDFCYITDNTYMKQEVVKMERDILNVLKFEMGNPTTKTFLRMFIRSSQEDDKYPSLPLEFMCSYLAELSLLEYGCVRLLPSVVAASVVFVARLTLDSDTNPWSKKLQEVTGYRASELKDCITCIHDLQLNRKGSSLMAIRDKYKQHRFKGVSTLLPPVEIPASYFEDLNE

SEQ ID NO: 7243 - DNA, 1293 bp, Yarrowia lipolytica CLIB99
  CDS (1)..(1293)
atggacagaacacgaacccacgacgaaaactcgctacatgagtacagaaagccgactgcggccggaggagcccccaccaaacgagtggcactcggaacagtgaccaacaccgcctcggtggctaccaaggccaaggttgccatctccaagccaccccaaagaatcacccgacaaccattagtcgcacagaaccaaaacattcccccattagcagcacaaacgtcaactacctcgcttgtgcagccgtgccctggttctgacgacaccgtggacgaggaggtggacacacagacggccgatgttgagccaacacagatagaagacgacttctacgagtccgacgaggaaggccccacccaacgatttgctgtgtcggagtccaacccccaggcgctgtaccccgtggtcgacaaggagtccatggccgagctcaaccgagtggccacctactttagcacaaacaacggcgtggatctggatgagaacgacgacgacacttacgacattagcatggtggcagaatatgcggaggagatcttcacatacatgaaggagctggaggtgcggttccagcccaaccccggatacatggactcgcagacggagatccactgggccatgcggtccattctggtggactggctggtgcaggtgcaccaccggttctcgctgctacccgagactctctttctcaccatcaactacattgaccggtttctgaccatcaagacagtgagtctcagcaagctgcagttggttggcgcggtggctctgtttgtggccgccaagtacgaggaaatcaactgccccagcgtgcaggaaatcgcatacatggttgataatggctaccatgtagacgagattctcaaggccgagcgatacatgatcgacttgctggattttaatctagggtggcccggccccatgtcgtttctgcgacgaacttccaaggccgacgactacgacctggaaacccggactctcgccaagtatttattggaggtgaccatcatggagaagacctttgttggcgccccaccatcgtggcttgctgccgcagcacactttctgtcgcggcgcatgcttaaccgtggccattggaccgatggccacacttattactctggctataccgaaaagcagctgctgcccgccgtcatgcggatcatccagtgctgccgggacccgcttacccaccacaaggccattttcgagaagtacaaggaccgcaagttcaagcgtgcatcggtctatgtgcaggagtggatggaccatgaggaaaacaaccactaa

SEQ ID NO: 7244 - protein, 430 aa, Yarrowia lipolytica CLIB99
MDRTRTHDENSLHEYRKPTAAGGAPTKRVALGTVTNTASVATKAKVAISKPPQRITRQPLVAQNQNIPPLAAQTSTTSLVQPCPGSDDTVDEEVDTQTADVEPTQIEDDFYESDEEGPTQRFAVSESNPQALYPVVDKESMAELNRVATYFSTNNGVDLDENDDDTYDISMVAEYAEEIFTYMKELEVRFQPNPGYMDSQTEIHWAMRSILVDWLVQVHHRFSLLPETLFLTINYIDRFLTIKTVSLSKLQLVGAVALFVAAKYEEINCPSVQEIAYMVDNGYHVDEILKAERYMIDLLDFNLGWPGPMSFLRRTSKADDYDLETRTLAKYLLEVTIMEKTFVGAPPSWLAAAAHFLSRRMLNRGHWTDGHTYYSGYTEKQLLPAVMRIIQCCRDPLTHHKAIFEKYKDRKFKRASVYVQEWMDHEENNH

SEQ ID NO: 7245 - DNA, 1461 bp, Candida albicans SC5314
  CDS (1)..(1461): transl_table=12
atgcgatcttataaatcatccataacggatgaaaatgagttgacaaaacaaagacttagagccaaaagtattgccaatttgagcagcaatcacacaacagctgggcaaccatcaacaagctctcaacatagagaggcattgactgatttgacctcacaggagaataaaaatcacccaagagtgaaactaacacaaacaaacaccaatcatcacagaaacagctcaagtagttcgaacaaaatacaaatatatcaacaaatagagcaaaagaaaaccgatatccatcagttcaaaaaaccaagattggagaaggtattactaaatgacgacgacgatgaaaccgatgacgaatttgacgacgaagaagataaagaaaacagatatcatgatctagagttgaatgaagatgacagtaaacatcaactaataagtgaagcatttgaaacaattgatgatcggggaataagtgagggtgaaaatgatacagcgcaagaagcacgtgaaagattagaggaagaaacacaatcacatacacaggatatgagatcaatatatggggttcatgtgcccatgcaaccaatgtggaataatgcgataataaacgagctcaaatacgttatacaaaagtactctcgtaatacgttggacgaaaatgacgaagatacttatgatactaccatggtggcagaatattcaccggaaattttcaattacttgcatgaacttgaaaataagtttacacctgatccaaattatatggatttccaagacgatctaaagtgggagatgcgtgcagtgcttattgattgggtcgtccaagtgcatgctcgattcaacttgttttcagaaaccttgtacttgactgtaaattacattgacagattcttatccaagagaagggtgtcattatccagatttcagttagttggagcagtagcattgtttattgctgccaaatacgaagaaatcaattgtcctacagtccaagaaattgcatacatggcagacaatgcctattcaatcgacgagtttttaaaagccgagagatttatgattgatgtattggaatttgatttgggatggccagggccaatgtcgtttttgagaagaatatcaaaagctgacgattatgattatgaaactagaacacttgccaaatattttcttgaaataactataatggactcaaaatttgttgcttctccaccaagttggttggccgctggagcacattacatatcaagaatactattgggaagaggtgaatggacagaattgcatgttttttatagtggctataccgaaaagcaattgcagccattggcagacgttttgttagagaactgtcgccatgctgaaataaaccataaagccattttcgaaaaatacaaggaaagaaggtatagaaaaagttcactttttgttcaagaatattttcgtcacataatgtcccagagttga

SEQ ID NO: 7246 - protein, 486 aa, Candida albicans SC5314
MRSYKSSITDENELTKQRLRAKSIANLSSNHTTAGQPSTSSQHREALTDLTSQENKNHPRVKLTQTNTNHHRNSSSSSNKIQIYQQIEQKKTDIHQFKKPRLEKVLLNDDDDETDDEFDDEEDKENRYHDLELNEDDSKHQLISEAFETIDDRGISEGENDTAQEARERLEEETQSHTQDMRSIYGVHVPMQPMWNNAIINELKYVIQKYSRNTLDENDEDTYDTTMVAEYSPEIFNYLHELENKFTPDPNYMDFQDDLKWEMRAVLIDWVVQVHARFNLFSETLYLTVNYIDRFLSKRRVSLSRFQLVGAVALFIAAKYEEINCPTVQEIAYMADNAYSIDEFLKAERFMIDVLEFDLGWPGPMSFLRRISKADDYDYETRTLAKYFLEITIMDSKFVASPPSWLAAGAHYISRILLGRGEWTELHVFYSGYTEKQLQPLADVLLENCRHAEINHKAIFEKYKERRYRKSSLFVQEYFRHIMSQS

SEQ ID NO: 7247 - DNA, 1911 bp, Aspergillus fumigatus Af293
  CDS (1)..(1911)
atgctgacaggttctgattctctgcagccccaacggattcgcgtccgtacggacgagaatgctcccgtcgccctgcctggcaacaaaacaatccatcaccgaaacaagtccactcccgccttatcagcggcctttcagaatggcacgactagaaatggtctcagaagggctgcatttggcgacgtcagcaacactgccaatctcgtcaaaggaagtcgggatgatgcctcccttgcgggaaagaaacaagtcaaagtcgtggagaaggcgcccgcagttgtcccagccagaagaacgaccattctctcgcagcctgcccagcgtcctatgtcgatgactagtctgaaaggtttggtgaataatgcctccaacctcaaagctcttgagccgtctgccaagcagatgggtattacccagcacgctcccaatacccggaagccgctgaacaagcgcaacacagtcttcaaagacaccctagaaccactggccgaaactaaggaatctgcatccaaggaacacgtcactgaagtgacagacgacaacgagggtaccactacttcattgccggctacagggcagggcatcaccaaagacgatgctcggttgatccaggattcgaagatacagtcggacgacacagaggaatactccattgtgaactctgacgacatcgacagggcaaacagagacttatacaaggccgatgacgacaactgcaaggtgcaggtcattgagcagctgcatgaacattgcgcaaacaccagcgaagcggacgacctcccaaagagccaccgcgaatctgcctcaagtgcccacctagcccagtcggagccggaggagtactgggatgaggaagatgacgagaacgaagaggatgacgggtatgtcactgcacgctcttaccgttctcgtggcgataacacgaccggaggagcgaccaccattttgttcccgaaatacaactctcaagtgcgtcgcgagctggctttagccaagcaggtcgtcgaagctaccagaacagcggaagacatcgaagatgaatactgggacactagtatggtcgctgaatatagtgatgaaattttcgaatacatgcgggagcaagagatcaggatgctgccaaacgcccattacatggataatcaagcagaaatccaatggtccatgcgctctgttctcatggactggcttgtacaggtccaccatcggttctcgctgcttccagagacacttttcttgtgtgtgaactatatcgatcgcttcctctcgagcaagatcgtgtctctgggcaagttgcagcttgtaggtgcgaccgcaatcttcattgctgcgaagtatgaagagatcaattgcccatcagtccaagagattgtgtacatggttgacggaggctatacggtggatgaaatcctgaaagccgagcgtttcatgctgagcatgctgcagttcgaattgggatggcctggaccgatgagtttcctgcggaagattagcaaggctgacgattatgacttggagactcgcaccttggctaagtacttcttggaggtgactatcatggatgagcgctttgtcggaagtcctccgagctttctggccgcaggtgctcattgtcttgccaggctgatgctgagaaaaggaacttggaccccgtcccatgtccactatgcaggttacacttactctcaactctatcctctggtctcactgatcctcgaatgctgcgagattccacgcaaacatcactcagccattttcgagaagtacaccgacaaacgtttcaagcgtgcttctctgtttgccgaggcggaaatcaagaaggggttctgtctgcctgaagtgacaagagaagctacctccaacgagcgcaactcacattacgagccagcccaccactggaaacgagtctaa

SEQ ID NO: 7248 - protein, 636 aa, Aspergillus fumigatus Af293
MLTGSDSLQPQRIRVRTDENAPVALPGNKTIHHRNKSTPALSAAFQNGTTRNGLRRAAFGDVSNTANLVKGSRDDASLAGKKQVKVVEKAPAVVPARRTTILSQPAQRPMSMTSLKGLVNNASNLKALEPSAKQMGITQHAPNTRKPLNKRNTVFKDTLEPLAETKESASKEHVTEVTDDNEGTTTSLPATGQGITKDDARLIQDSKIQSDDTEEYSIVNSDDIDRANRDLYKADDDNCKVQVIEQLHEHCANTSEADDLPKSHRESASSAHLAQSEPEEYWDEEDDENEEDDGYVTARSYRSRGDNTTGGATTILFPKYNSQVRRELALAKQVVEATRTAEDIEDEYWDTSMVAEYSDEIFEYMREQEIRMLPNAHYMDNQAEIQWSMRSVLMDWLVQVHHRFSLLPETLFLCVNYIDRFLSSKIVSLGKLQLVGATAIFIAAKYEEINCPSVQEIVYMVDGGYTVDEILKAERFMLSMLQFELGWPGPMSFLRKISKADDYDLETRTLAKYFLEVTIMDERFVGSPPSFLAAGAHCLARLMLRKGTWTPSHVHYAGYTYSQLYPLVSLILECCEIPRKHHSAIFEKYTDKRFKRASLFAEAEIKKGFCLPEVTREATSNERNSHYEPAHHWKRV

SEQ ID NO: 7249 - DNA, 1194 bp, Canis familiaris
  CDS (1)..(1194)
atggcgctgctccgacgcccgacggtgtccactgatttggagaatgttgacactggagttaattctaaagctaaaagtcatgtgacaatcagacgggcagttttagaagaaattggaaatagagttacaaccagagccacacaagtagctaagaaagctcagaacaccaaaatacctgttcaactcaccaaaacaaatgtcaacaaacaactgaaacctactgcttctgtgaaaccagtacagatggaaatgttggctccaaagggtcctccgccggccctggaggagatctccatgaaggaagagaacctctgccaagctttctctgatgccttgctctgcaaaattgaggacattgatcaagaggactgggaaaaccctcagctctgcagtgactatgttaaggatatctaccagtatctacggcagcttgaggtgaggagcccgacgcgggacttgatcccgaatggaagagagataaacggacgcatgcgtgccatcctggtggactggctggtgcaagtccactccaagtttaggctgctgcaggagactctgtacatgtgcatcgccgtcatggaccgatttttacaggttcagctggtttctcgtaagaagcttcagctggttgggattacagctctgctcttggcttccaagtatgaggagatgttttctccaaatattgaagacttcgtttacatcacagacaatgcttataccagttcccagatccgagaaatggaaacactgattttgaaagaactgaaatttgagctgggtcgacctttgccactgcatttcttaagacgggcatcaaaagctggggaggttgatgtggaacagcatactttagccaaatatttcatggagctgactctcatcgactatgacatggtgcattatcacccttcaaaggtggcagcggctgcttcctgcctgtcccaaaagattctgggccaaggaaaatggaacttaaagcagcagtattatactggatacacagagaatgaactattggaagtcatgcagcacatggccaaaaatgtagtgaaagtcaatgaaaacttaacgaaattcatcgccatcaagaataagtatgcaagcagcaaactcctgaagatcagcacaattcctcagctgaactcaaaagccatccaagagcttgcctcgcctctgatgggacggtcgtag

SEQ ID NO: 7250 - protein, 397 aa, Canis familiaris
MALLRRPTVSTDLENVDTGVNSKAKSHVTIRRAVLEEIGNRVTTRATQVAKKAQNTKIPVQLTKTNVNKQLKPTASVKPVQMEMLAPKGPPPALEEISMKEENLCQAFSDALLCKIEDIDQEDWENPQLCSDYVKDIYQYLRQLEVRSPTRDLIPNGREINGRMRAILVDWLVQVHSKFRLLQETLYMCIAVMDRFLQVQLVSRKKLQLVGITALLLASKYEEMFSPNIEDFVYITDNAYTSSQIREMETLILKELKFELGRPLPLHFLRRASKAGEVDVEQHTLAKYFMELTLIDYDMVHYHPSKVAAAASCLSQKILGQGKWNLKQQYYTGYTENELLEVMQHMAKNVVKVNENLTKFIAIKNKYASSKLLKISTIPQLNSKAIQELASPLMGRS

SEQ ID NO: 7251 - DNA, 1011 bp, Paramecium tetraurelia
  CDS (1)..(1011): transl_table=6
atgatccacgaacagtatagattcttcggcaaagaattggttaattcatcgggtgaattctaaaaggaaaacacagacagaaataaaccaaagcatcttactgtattacctagatatctcaaactaaatttatggtaggaagagaaagaaaataaaatggaagttgaaaataatactcaacaattatgttcttttgattaacaaatgattaaagacccttaattcacttctttatataataaggagatctatacttatttgttgacttaagaagaaaaatatttagttagtaataattacatgaatgaataataacaacctgacttaaatgcaagaatgagagcaattcttttagattggttgattgatgtccatctcaaatttaaattaagagatgagaccttatatgttacaacttatttaattgacaggtttcttaattttaagactacaaccagataataactttaattagttggagtagcttcattatttatagcttgtaaatatgaagaaatatatccccctgatttgaaagattttgtgtacatcactgacaatgcctacacaaaataggatgtccttgaaatggaaggataaatattataaacattagacttctccataacccaaccatcaagttattgttttctttagagatttggtagaattgcaggattagatactaagaatttaagcttggcttagtatcttttagagctatcaattgttgacatcaaatttatgaactataaaccatcgtttctatctgcagcagctatttatttagtccacaaaataaggaagactcctcaatcttggagtgaagaaatgcagaaaatgactggttataatgaataagaacttaggtattgtgctaaagaaatgtgtcttgttttgcaatcatcagacaaatcaaatttataggctgttagaaaaaagtttgcttagcctaaatactaagaagtatcacgtattagagtagaaaggcaaattaaataataaaaatga

SEQ ID NO: 7252 - protein, 336 aa, Paramecium tetraurelia
MIHEQYRFFGKELVNSSGEFQKENTDRNKPKHLTVLPRYLKLNLWQEEKENKMEVENNTQQLCSFDQQMIKDPQFTSLYNKEIYTYLLTQEEKYLVSNNYMNEQQQPDLNARMRAILLDWLIDVHLKFKLRDETLYVTTYLIDRFLNFKTTTRQQLQLVGVASLFIACKYEEIYPPDLKDFVYITDNAYTKQDVLEMEGQILQTLDFSITQPSSYCFLQRFGRIAGLDTKNLSLAQYLLELSIVDIKFMNYKPSFLSAAAIYLVHKIRKTPQSWSEEMQKMTGYNEQELRYCAKEMCLVLQSSDKSNLQAVRKKFAQPKYQEVSRIRVERQIKQQK

SEQ ID NO: 7253 - DNA, 1377 bp, Hemicentrotus pulcherrimus
  CDS (1)..(1377)
atggccttctcaattggtaattcaaacgctagtgatattatggcgaatatggcacaaggaggacaacagtttggaaaaaaaaccaagcgagatgacaataccagcagaaacggaccacaggcttgcaaaagggcggcattgggaacgataacgaacgtttcatcaacaagagtacaaccatctcgagcggcaaagcattttagggtctctggagagaactcttttcctgtgtttcaagatgagaatgcacactctaggataccacagggcaagccattcggcattccatcagcgggcgcagcaccagccttttctattcacgtcgacacaacatcatcctacgtgcaatcaagtacatcaacatcaattaagagcacggacaaagaaaacgaacacattttgttggacaatgctctgtcactaccagtacctcaagctcaaaggattcccctgagaacattccctgatgtagaagataacaatgtcagtctcaatgaagaaagtttaacatcgtcagaattctctcctatgctgcttgatacatctctggatgcaaagtgcatatcaccccgaacagtagatataagagacttatccttaggagaaccagaatatgcagaggagatatatcagtacttgaagactgcagagtcaaagcacagacccaagcacgggtacatgaggaaacagccagacatcaccaacagcatgcgttgcatcctagtcgactggttggtcgaggtatcggaagaataccgtcttcacaacgagactctctacctggctgcggccttcatcgatagattcctttcacagatgagtgtactgagggcaaagctacagctggtcggcacagccagcatgttcgtagcctctaaatacgaggagatctacccacccgatgtgaaggagttcgtctacatcaccgacgacacctactccatcaagcaggtccttcgaatggagcacctgatcctcaaggtcttgtcctttgacctggccgcacccaccatcaactctttcttgccgaggttcatcaaagcagcgcaggcaaactcaaagacggaacatctcacgcagtaccttgctgagttgactctacaggagtacgacttcatcaagtatgccccatcgatgattgctgcatcagcagtctgccttgccaaccacaccctcaacaacgaagaatggaccccaaccatggcccactacactgactaccagctgggtgacatctatccctgtgtgcaagatcttcatcagctcttcatcaaggcacccaccatggaacaacaggctgtcagggagaagtacaagtctcaaaagtacagcggagcttccatgacaccagtccctaccactctccccacacaatga

SEQ ID NO: 7254 - protein, 458 aa, Hemicentrotus pulcherrimus
MAFSIGNSNASDIMANMAQGGQQFGKKTKRDDNTSRNGPQACKRAALGTITNVSSTRVQPSRAAKHFRVSGENSFPVFQDENAHSRIPQGKPFGIPSAGAAPAFSIHVDTTSSYVQSSTSTSIKSTDKENEHILLDNALSLPVPQAQRIPLRTFPDVEDNNVSLNEESLTSSEFSPMLLDTSLDAKCISPRTVDIRDLSLGEPEYAEEIYQYLKTAESKHRPKHGYMRKQPDITNSMRCILVDWLVEVSEEYRLHNETLYLAAAFIDRFLSQMSVLRAKLQLVGTASMFVASKYEEIYPPDVKEFVYITDDTYSIKQVLRMEHLILKVLSFDLAAPTINSFLPRFIKAAQANSKTEHLTQYLAELTLQEYDFIKYAPSMIAASAVCLANHTLNNEEWTPTMAHYTDYQLGDIYPCVQDLHQLFIKAPTMEQQAVREKYKSQKYSGASMTPVPTTLPTQ

SEQ ID NO: 7255 - DNA, 798 bp, Brachydanio rerio
  CDS (1)..(798)
atgctgtgccaggcattctctgatgttctgcttaatatcaaggatgttgacgcagatgattatgataatcccatgctttgcagtgaatatgtcaaggacatctatttgtatttgcgccagcttgagactgaacaagctgtaaggccaaaatatctggcaggaaaggaagttactgggaacatgcgtgccattcttatcgactggcttgtgcaagtccagattaagtttaggctgcttcaggagaccatgtacatgactgttgccatcatcgatcgcttccttcaggatcatccagttccaaagaagcagctgcaacttgttggtgtaacggccatgttcatcgcctcaaaatatgaagaaatgtacccaccagagattgcagactttgcttttgtgacagaccgtgcatacaccaccagtcagatccgggagatggagatgaaggtcctgagagtcctcaactttggttttggaaggcctctaccactacagtttctcaggagggcctccaagattggagatgtgactgcagaacatcacacattagcgaaatatttcctggagctcaccatggtcgattatgacatggtccactaccctccctctcagatggccagtgctgcttatgccctgaccctgaaggtcttcaactgtggtgactggacccctactcttcagcactacatgggctacactgaagatgagctggttcctgtgatgcagcatattgccaaaaatgttgtgagggtcaacgagggcctttctaagcatctggctgtgaagaacaagtattcgtag

SEQ ID NO: 7256 - protein, 265 aa, Brachydanio rerio
MLCQAFSDVLLNIKDVDADDYDNPMLCSEYVKDIYLYLRQLETEQAVRPKYLAGKEVTGNMRAILIDWLVQVQIKFRLLQETMYMTVAIIDRFLQDHPVPKKQLQLVGVTAMFIASKYEEMYPPEIADFAFVTDRAYTTSQIREMEMKVLRVLNFGFGRPLPLQFLRRASKIGDVTAEHHTLAKYFLELTMVDYDMVHYPPSQMASAAYALTLKVFNCGDWTPTLQHYMGYTEDELVPVMQHIAKNVVRVNEGLSKHLAVKNKYS

SEQ ID NO: 7257 - DNA, 1305 bp, Dreissena polymorpha
  CDS (1)..(1305)
atgaatacaagagcagcgtctgctaatttagctggcaggatggcactgcagcaaatcaacagtgacaatattgaccaaattcctggcaaggcccaacttctgcaaagacctcaaacctcacacctaatgcaaagaaatacccttagtgacattggaaatcaagtatctgcaatcacaatatcagatgccagtaaaaagggtcctattaaaaaagaaattgtgcaagtaaatcccagacagcagaaagcattgaccaagaccaaagcaactacatccctcaaagcattggcagagaagaaggaaaccaaaaaggagcatgatgaattccatttcgttgagccttcatttccttcgcgaattccagtcccaacagccactgttcacccattgccatctgcacatgtgcctatggacacaagtgatgcgggaaaagatgcattttcgaaagctttgctaaatgtacagggcattgatgcaaatggcaggggaaacccccaactagtcagtgaatatgtcaacgatatatacgagtacatgagaatattagagaaaaagtacccaattgcggacagctacttagaaaagcaagaaatctccgggaagatgcgtgccattctcattgactggttgtgccaagttcatcacagatttcatcttctccaagaaacactctacctgactgttggcataatcgatagatttctccaggaatctcctgtgaccaaaaacaaattgcagttggtcggtgtcacatccatgttgattgcctccaaatatgaagagatgtacgcacctgaagttgcagactttgtttatattacagacaatgcttacactaaaaaggaaattttggaaatggaacaaactatcttacggacattaaactttagttttggaaagccattgtgtttgcatttcttgaggaggaattcaaaggctggtcaggttgatgccagcaagcatacgctggccaagtacctgatggagttgacgatagtggagtacgatatggtgcaatatctcccttctcaaatagctgccgcagccctatgtctttctatgaaacttctgggcgactgtaaatggacggagacattggcgcactatagctcttatacagaggaagaacttgtgccaaccatgcgtaaacttgccagtctagtcatgaaacaggaggattccaaactcaaactcactgccataaggaccaaatattcaagttcaaaattcatgaagataagcaccataccagctttgaagtctccactggtgcaggaacttgcaggtgcttcagactgctcctaa

SEQ ID NO: 7258 - protein, 434 aa, Dreissena polymorpha
MNTRAASANLAGRMALQQINSDNIDQIPGKAQLLQRPQTSHLMQRNTLSDIGNQVSAITISDASKKGPIKKEIVQVNPRQQKALTKTKATTSLKALAEKKETKKEHDEFHFVEPSFPSRIPVPTATVHPLPSAHVPMDTSDAGKDAFSKALLNVQGIDANGRGNPQLVSEYVNDIYEYMRILEKKYPIADSYLEKQEISGKMRAILIDWLCQVHHRFHLLQETLYLTVGIIDRFLQESPVTKNKLQLVGVTSMLIASKYEEMYAPEVADFVYITDNAYTKKEILEMEQTILRTLNFSFGKPLCLHFLRRNSKAGQVDASKHTLAKYLMELTIVEYDMVQYLPSQIAAAALCLSMKLLGDCKWTETLAHYSSYTEEELVPTMRKLASLVMKQEDSKLKLTAIRTKYSSSKFMKISTIPALKSPLVQELAGASDCS

SEQ ID NO: 7259 - DNA, 1110 bp, Rana japonica
  CDS (1)..(1110)
atgcagacaacaaaatggagattgcggcctgcaaagaaggttggactgttgaagccacagcacagaaatgctctgggggatatcgggaacaacctgaacagagccaaagcagccttaaaaaagggaagcaaagctttaagaactgatgtggaaaaggttgccaagccagctcctgtggaggaggaaaagcctgtgcccctgagcccaatggacacatccggttcttctccaatggaagcagaaagtgaagctttctcagatgctctactgcaggtgaaggatgtggatgaagatgatgctgacaatcccatgctgtgtagtgattatgtgaaggatatctactgctacctgagagacctggaggctgaacgtgctgtccggccagactacctcaaaggtcaagagataactggaaatatgagggcaatccttgttgactggctggttcaagttcacttgcggttcaagctgctccaggagaccatgttcatgactgtctcaattttggacagatttttacaggtaaaccctgtgccaaagaaatcgctgcagcttgctggggtgtctgccatgttcattgcatctaaatatgaagagatttattgtcccacgattggagacttctcatttgttactgatcacacatttacaaagagccagatcagaaacatggagatgcagattctaaccattttgaattttgacattggaaagcctttaccacttcactttctaaggagagcatcaaagattggggaggtagatgctgttttgcataccctggcaaagtatcttatagaactttctatggtggactacgaaatggtgcacttcccaccttcacaagtggcagctgcagccttctgcctgtctcagaaggttttagatggaggggaatggactccaactctacagcactatatgggctacagtgagagcagtctcatcccatccatgcggcacttggcaaagaatgtcctgaaggttaacggggggctcacaaagtttatgtctgtcagagacaagtatgccaaaagccagcaaatgaggatcagctgtttgccacaactcaattcagatttcatggtgaaacttgccaaaaatgtatga

SEQ ID NO: 7260 - protein, 369 aa, Rana japonica
MQTTKWRLRPAKKVGLLKPQHRNALGDIGNNLNRAKAALKKGSKALRTDVEKVAKPAPVEEEKPVPLSPMDTSGSSPMEAESEAFSDALLQVKDVDEDDADNPMLCSDYVKDIYCYLRDLEAERAVRPDYLKGQEITGNMRAILVDWLVQVHLRFKLLQETMFMTVSILDRFLQVNPVPKKSLQLAGVSAMFIASKYEEIYCPTIGDFSFVTDHTFTKSQIRNMEMQILTILNFDIGKPLPLHFLRRASKIGEVDAVLHTLAKYLIELSMVDYEMVHFPPSQVAAAAFCLSQKVLDGGEWTPTLQHYMGYSESSLIPSMRHLAKNVLKVNGGLTKFMSVRDKYAKSQQMRISCLPQLNSDFMVKLAKNV

SEQ ID NO: 7261 - DNA, 1524 bp, Candida albicans
  CDS (1)..(1524): transl_table=12
atgcgatcttataaatcatccataacggatgagaatgagttgacaaaacaaagacttagagccaaaagtattgccaatttgagcagcaatcacgcaacagctgggcaaacatcaacaagctctcaacatagagaggcattgactgatttgacctcacaggagaataaaaatcacccaagagtgaaactcacacaaacaaacaccaatcatcacagaaacagctcaagtagttcgaacaaaatacaaatatatcaacaaatagagcaaaagaaaaccgatatccatcaattcaaaaaaccaagattggagaaggtattactaaatgacgacgacgatgaaaccgatgacgaatttgacgacgaagaagataaagaaaacagatatcatgatctagagttgaatgacgatgacagtaaacatcaactaataagtgaagcatttgaaacaattgatgaccggggaataagtgaaggtgagaatgatacagcgcaagaagcacgtgaaagattagaggaagaaacacaatcacatacacaggatatgagatcgatatatggggttcatgtacccatgcaaccaatgtggaataatgcgataataaacgagctcaaatacgttatacaaaagtactctcgtaatacgttggacgaaaatgacgaagatacttatgatactaccatggtggcagaatattcaccggaaattttcaattacttgcatgaacttgaaaataagtttacacctgatccaaattatatggatttccaagacgatctaaagtgggagatgcgtgcagtgcttattgattgggtcgtccaagtgcatgctcgattcaacttgttttcagaaaccttgtacttgactgtaaattacattgacagattcttatccaagagaagggtgtcattatccagatttcagttagttggggcagtagcattgtttattgctgccaaatacgaagaaatcaattgtcctacagtccaagaaattgcatacatggcagacaatgcctattcaattgacgagtttttaaaagccgagagatttatgattgatgtattggaatttgatttgggatggccagggccaatgtcgtttttgagaagaatatcaaaagctgacgattatgattatgaaactagaacacttgccaaatattttcttgaaataactataatggactcaaaatttgttgcttctccaccaagttggttggccgctggagcacattacatatcaagaatactattgggaagaggtgaatggacagaattgcatgttttttatagtggctataccgaaaagcaattgcagccattggcagacgttttgttagagaactgtcgccatgctgaaataaaccataaagccattttcgaaaaatacaaggaaagaaggtatagaaaaagttcactttttgtacaagaatattttcgtcacataatgtccagagttgatctaaagacaagtttccaacaatgcggtactttacattttattcaatctagccaaaatcattaa

SEQ ID NO: 7262 - protein, 507 aa, Candida albicans
MRSYKSSITDENELTKQRLRAKSIANLSSNHATAGQTSTSSQHREALTDLTSQENKNHPRVKLTQTNTNHHRNSSSSSNKIQIYQQIEQKKTDIHQFKKPRLEKVLLNDDDDETDDEFDDEEDKENRYHDLELNDDDSKHQLISEAFETIDDRGISEGENDTAQEARERLEEETQSHTQDMRSIYGVHVPMQPMWNNAIINELKYVIQKYSRNTLDENDEDTYDTTMVAEYSPEIFNYLHELENKFTPDPNYMDFQDDLKWEMRAVLIDWVVQVHARFNLFSETLYLTVNYIDRFLSKRRVSLSRFQLVGAVALFIAAKYEEINCPTVQEIAYMADNAYSIDEFLKAERFMIDVLEFDLGWPGPMSFLRRISKADDYDYETRTLAKYFLEITIMDSKFVASPPSWLAAGAHYISRILLGRGEWTELHVFYSGYTEKQLQPLADVLLENCRHAEINHKAIFEKYKERRYRKSSLFVQEYFRHIMSRVDLKTSFQQCGTLHFIQSSQNH

SEQ ID NO: 7263 - DNA, 1380 bp, Pneumocystis carinii
  CDS (1)..(1380)
atgaacgcagcgaggcgtgtaacacgtcagacggcaacgtttaatcttaatgatgagaacaaattgcatggacaaatatctcgggtgaagcaagtatctacacaaggattagaaggggtaaataagccatggacggcggcgacgcgaaagagagcagcattaggagatgtaagcaatgtgcataataaggagaatcagacggcgaaaacgaaaacgcagccgttatcaaccaaagcacgcgtggtgacgaaaaccggagttcaaagtcatcaaagcaaagaatccgttcatacggtaccaacgggagaattgcgtggtgaagaaacaacacgaaaaagacggacatcaaaggttttaacggagcaagaagtgatcattgaggtggaacaaacacaagcaagtaaaaaagtgagaaccgatggccttttaaacggatcggtacaagagcatccagcatcacaagattgggatgatttagatgcggatgatgctcatgatccattgatggtatcggaatacgttgaagaaatcatgggttacatgagggaattagaggtgttaacacttcctttaccagattatatggatcgacagaaagaacttcaatggaaaatgcgaggaatcttggtagattggctaattgaggttcatgcgaaatttcgtcttcttccagaaacgttatttctttctgtcaatattattgatcgatttttatccctacgagtatgttcgcttcctaagcttcaattagtagggattacagcactttttatcgcagcaaaatatgaagaagtgatgtgtccatcgatacaaaattttatgtacatggcagatggtggatatacgaatgaagaaattctaaaagcagaacaatacgttttacaagttcttggatatgatatgtcatatccaaatcccattaattttctaagaagagtatcaaaggcagataattatgatattcagacacgtacagtggcaaaatatcttatggaaattagtcttcttgatcatcgatttttgccttttgtgccatctaatattgcagcttcgggcatttatttggctagaattatggttactggtggcaattggaatgctaatttaatacattattcgggatataaagaatcagatcttgttccatgttctaaaatgatgctggattatctttcacgatcagttataaaacatgaagcattttttaaaaaatatgccagcaaaaaattcatgaaagctagtttatttgttcgcgattgggttaaaaaacattacgatcttgaggcaaacgtgcgattaaacactatctctttcgattacgataaccatgaatcaaatgaaatacatcaggacttagaagaggaagaaggatccctatag

SEQ ID NO: 7264 - protein, 459 aa, Pneumocystis carinii
MNAARRVTRQTATFNLNDENKLHGQISRVKQVSTQGLEGVNKPWTAATRKRAALGDVSNVHNKENQTAKTKTQPLSTKARVVTKTGVQSHQSKESVHTVPTGELRGEETTRKRRTSKVLTEQEVIIEVEQTQASKKVRTDGLLNGSVQEHPASQDWDDLDADDAHDPLMVSEYVEEIMGYMRELEVLTLPLPDYMDRQKELQWKMRGILVDWLIEVHAKFRLLPETLFLSVNIIDRFLSLRVCSLPKLQLVGITALFIAAKYEEVMCPSIQNFMYMADGGYTNEEILKAEQYVLQVLGYDMSYPNPINFLRRVSKADNYDIQTRTVAKYLMEISLLDHRFLPFVPSNIAASGIYLARIMVTGGNWNANLIHYSGYKESDLVPCSKMMLDYLSRSVIKHEAFFKKYASKKFMKASLFVRDWVKKHYDLEANVRLNTISFDYDNHESNEIHQDLEEEEGSL

SEQ ID NO: 7265 - DNA, 1011 bp, Paramecium tetraurelia
  CDS (1)..(1011): transl_table=6
atgatccacgaacagtatagattcttcggcaaagaattggttaattcatcgggtgaattctaaaaggaaaacacagacagaaataaaccaaagcatcttactgtattacctagatatctcaaactaaatttatggtaggaagagaaagaaaataaaatggaagttgaaaataatactcaacaattatgttcttttgattaacaaatgattaaagacccttaatacacttctttatataataaggagatctatacttatttgttgacttaagaagaaaaatatttagttagtaataattacatgaatgaataataacaacctgacttaaatgcaagaatgagagcaattctcttagattggttgattgatgtccatctcaaatttaaattaagagatgagaccttatatgttacaacttatttaattgacaggtttcttaattttaagactacaaccagataataactttaattagttggagtagcttcattatttatagcttgtaaatatgaagaaatatatccccctgatttgaaagattttgtgtacatcactgacaatgcctacacaaaataggatgtccttgaaatggaaggataaatattataaacattagacttctccataacccaaccatcaagttattgttttctttagagatttggtagaattgcaggattagatactaagaatttaagcttggcttagtatcttttagagctatcaattgttgacatcaaatttatgaactataaaccatcgtttctatctgcagcagctatttatttagtccacaaaataaggaagactcctcaatcttggagtgaagaaatgcagaaaatgactggttataatgaataagaacttaggtattgtgctaaagaaatgtgtcttgttttgcaatcatcagacaaatcaaatttataggctgttagaaaaaagtttgcttagcctaaatactaagaagtatcacgtattagagtagaaaggcaaattaaataataaaaatga

SEQ ID NO: 7266 - protein, 336 aa, Paramecium tetraurelia
MIHEQYRFFGKELVNSSGEFQKENTDRNKPKHLTVLPRYLKLNLWQEEKENKMEVENNTQQLCSFDQQMIKDPQYTSLYNKEIYTYLLTQEEKYLVSNNYMNEQQQPDLNARMRAILLDWLIDVHLKFKLRDETLYVTTYLIDRFLNFKTTTRQQLQLVGVASLFIACKYEEIYPPDLKDFVYITDNAYTKQDVLEMEGQILQTLDFSITQPSSYCFLQRFGRIAGLDTKNLSLAQYLLELSIVDIKFMNYKPSFLSAAAIYLVHKIRKTPQSWSEEMQKMTGYNEQELRYCAKEMCLVLQSSDKSNLQAVRKKFAQPKYQEVSRIRVERQIKQQK

SEQ ID NO: 7267 - DNA, 1338 bp, Asterina pectinifera
  CDS (1)..(1338)
atgtccttcgccttcagtgaaaaccccctgacttatgacgtggaaaactcacaaaatgctggtcctcagacaaggaagacgaaaagggaagatgcagggaggggaaatggaccacaagcctgcaaaagagccgccctaggaacgctaagcacaaacgttacgagaaagcagccgtcccgcgcggctaaacagtctggtttcgccgatggcttctacaattatcaggatgaaaacgcctttgccaggccagcggcgggaaagtcaacgggatcttgcggtttcgcgctgccgcccaccgcgtcccagcccagcttcagtatccacatcgacccggtggagcccgcaccttcacgggcacgattcctcaaggaacaaaagcctactgaactacctttagatcccattggatacttcgttacccgaagtagaaagacagcccttagaactgtttttactctagatgaaagtgcatctcctatggtcctcgacacatcgctcagtgaggagaacacggcacaagcaacgatagaagacatagacaactcagacggtgtgtttggggttccggagtacgcagaagatatctacgaatacctaagagaggcagagttgaggaaccgtcccaagcctggctacatgcgcaagcagccagacatcacctcaggcatgcgttccatcctagtagactggctcatcgaggtgggcgaggagtaccgacttcacaacgagacgctctacctggccgtctcctacatcgacaggttcctgtcccagatgagcgtgctcaggtccaagctgcagctggtcggggctgccagcatgttcttggcggccaaatttgaagagatttaccctccggaagtcaatgagtttgtgtacatcaccgacgacacgtacacggtcaagcaggtcctacgcatggaacatctcatcctgaaggtgttgtcatttgatgtggccgtgcccacggccaacgctttcctgtcaaggtacctgaaggcggccaaggcagactccaggaatggaacatctagccagtatttggctgagctgacgttaccggattgcgagtacatcaagtatatcccatcaaccattgcagcagctgccgtttgtcttgccaattacacgctcagtggaacggcctggactccaatgcttgagaagcactctggctacaatttggaggacatcgctccatgcgtgcgtgatttactcaagacgttcactaacgcaccaagccaaagccagcaggcggcccaggagaaatacaaatcacagagatacaacagtgtttccatgattgcggcccctacaacactgccctcttggttatga

SEQ ID NO: 7268 - protein, 445 aa, Asterina pectinifera
MSFAFSENPLTYDVENSQNAGPQTRKTKREDAGRGNGPQACKRAALGTLSTNVTRKQPSRAAKQSGFADGFYNYQDENAFARPAAGKSTGSCGFALPPTASQPSFSIHIDPVEPAPSRARFLKEQKPTELPLDPIGYFVTRSRKTALRTVFTLDESASPMVLDTSLSEENTAQATIEDIDNSDGVFGVPEYAEDIYEYLREAELRNRPKPGYMRKQPDITSGMRSILVDWLIEVGEEYRLHNETLYLAVSYIDRFLSQMSVLRSKLQLVGAASMFLAAKFEEIYPPEVNEFVYITDDTYTVKQVLRMEHLILKVLSFDVAVPTANAFLSRYLKAAKADSRNGTSSQYLAELTLPDCEYIKYIPSTIAAAAVCLANYTLSGTAWTPMLEKHSGYNLEDIAPCVRDLLKTFTNAPSQSQQAAQEKYKSQRYNSVSMIAAPTTLPSWL

SEQ ID NO: 7269 - DNA, 1578 bp, Bombyx mori
  CDS (1)..(1578)
atggaaattcaactaaggcggcatagatcggcacagattcaagaccaagaaaatctgtatgctggtgtccgcgggaaaggtaatggagccgtccctacaaaaaggctgggattaacagtacgtggggcgttaggtgatttgaacacaaatgtgcaagttcaacgcgaagctctcggcaaagttgccgttacaactgctgaatttgagaaaaaagccaccctaaaccgtggcgtagtacgaagcaactatagtcatgtaacatcaaaagtagacacaggattagctgtcaaaaatgttattcagccatcttcaaggcccccactccgccgtgaagagagcactgctggattgaccgccagagctgtaactcgtaccagggtcgctttaaaagataatcagaacaagccaaatgaaataaaagaatcaattaacatctacatacaaactaagaaatgtcaagacacaaaaaagacaaagctgcccatgctaaaggaaaataaagaattaagaacatccaaatcacatctaaaagatggaactgactctttacggaaaacaaaactagcattaaaagacccaatcgaatcattaggaaagttaaaactagctgaaacataccctgagaagggaatgggcttaatagataaagccaaggtagaaaagcaagctgaattctttgaaactgtgtttgatattacacctccactgcctgaggatattgaagatattgatgccggagacaacaacagccctttgctaatgtctatgtatatcaaggacatttacaaatacttgactgaattggaagagaaatattctattgagcctgatcatttaaaaaagcagactgttataactggcaaaatgagagcaacactcattgattggcttgtggaagttcaacgccaattctcattagtattggagacattccatctcactgttggcattattgacagatatttgcaggttgttccaaatgtccagcgcaatcaattacaattagtcggtgtgacggctatgttcatagcaagcaagtatgaagagatctacgctccagatgttggcgattttgtttatgtcactgataatgcctacaccaagtctgatgtattccgctgtgagagagacattatgtgcaaactgggcttctgtcttgcgagaccgatacctttgagttttcttagaagatttgtaaaagccgcacgtggtacatcgaggaatcatcatttggccaaatactttgttgatctctgtctagtcgaatatactatggcccattatcgaccgtcagaactagcagcggcagcaatctgcctctcacttcatttgctatcgagcaagacactctccgaagtatggacgtctaccttgtcttactactctgggtacgatcttgaccacatagatccgattataaggaaaatcgcaaagattgttattaacattgaaaattccaaatataaagccgtatataacaaatatttggacacgacgttggctaaagtttccagtcttccgcagttgaaaagcgaagcgatttatgaactcgcaaagatatcaagcccaagcccttag

SEQ ID NO: 7270 - protein, 525 aa, Bombyx mori
MEIQLRRHRSAQIQDQENLYAGVRGKGNGAVPTKRLGLTVRGALGDLNTNVQVQREALGKVAVTTAEFEKKATLNRGVVRSNYSHVTSKVDTGLAVKNVIQPSSRPPLRREESTAGLTARAVTRTRVALKDNQNKPNEIKESINIYIQTKKCQDTKKTKLPMLKENKELRTSKSHLKDGTDSLRKTKLALKDPIESLGKLKLAETYPEKGMGLIDKAKVEKQAEFFETVFDITPPLPEDIEDIDAGDNNSPLLMSMYIKDIYKYLTELEEKYSIEPDHLKKQTVITGKMRATLIDWLVEVQRQFSLVLETFHLTVGIIDRYLQVVPNVQRNQLQLVGVTAMFIASKYEEIYAPDVGDFVYVTDNAYTKSDVFRCERDIMCKLGFCLARPIPLSFLRRFVKAARGTSRNHHLAKYFVDLCLVEYTMAHYRPSELAAAAICLSLHLLSSKTLSEVWTSTLSYYSGYDLDHIDPIIRKIAKIVINIENSKYKAVYNKYLDTTLAKVSSLPQLKSEAIYELAKISSPSP

SEQ ID NO: 7271 - DNA, 1338 bp, Arabidopsis thaliana
  CDS (1)..(1338)
atggcgacgagagcaaacgtacctgaacaagtcagaggtgctcctctcgttgatggtttgaagattcagaacaaaaacggtgctgtgaagagtcggcgtgccctcggtgacatcggaaatcttgtttctgttcccggagttcaaggaggaaaggctcaacctccgattaatcgacccattactcgaagtttccgtgcccagttattagcgaatgcccaactcgaaagaaagccaatcaatggagacaacaaggttccagctcttggtccaaagagacaacctcttgctgcaagaaacccagaagctcaaagggcggttcagaagaagaatctagtggttaagcaacagacgaagcctgttgaagtgatcgagacgaagaaggaggtgactaaaaaggaagtagcgatgtcacctaagaataagaaagtgacgtactcgtctgtacttagtgctcggagcaaagctgcttgtggtatagtcaacaaaccaaagattatcgatattgatgaatctgacaaagataaccatttggctgcggtggagtatgttgatgatatgtactcgttctataaagaagttgagaaggagagtcagcctagaatgtacatgcacattcagactgaaatgaatgagaagatgagagcgatcttgattgattggttactagaagttcacatcaagtttgagctcaaccttgaaactctgtacctcaccgtcaacatcattgatcgattcctctctgtgaaagctgtccctaaaagagagttacagctagtgggaatcagtgccttgcttattgcttccaaatatgaagaaatctggccacctcaggttaacgatctggtgtatgtcacggacaatgcttacagtagcagacagattctggtgatggagaaggcaattcttggaaacctcgaatggtatttgacagtcccgactcaatacgtcttccttgtccgcttcatcaaagcttcgatgtctgatccagaaatggagaatatggttcacttccttgctgaattggggatgatgcattacgacaccttgacgttctgtccctccatgcaagctgcttcagctgtttacacggcaagatgctcattgaacaagtcccctgcttggactgatacattgcagttccacaccggctacacagagtctgagattatggactgctcaaagcttttagcttttcttcactcgagatgcggtgagagcaggctacgtgcagtgtacaagaagtactcgaaggcagagaatggaggtgttgctatggtttctccggccaagtctctcttgagtgctgctgctgattggaagaagcctgtttcttcttag

SEQ ID NO: 7272 - protein, 445 aa, Arabidopsis thaliana
MATRANVPEQVRGAPLVDGLKIQNKNGAVKSRRALGDIGNLVSVPGVQGGKAQPPINRPITRSFRAQLLANAQLERKPINGDNKVPALGPKRQPLAARNPEAQRAVQKKNLVVKQQTKPVEVIETKKEVTKKEVAMSPKNKKVTYSSVLSARSKAACGIVNKPKIIDIDESDKDNHLAAVEYVDDMYSFYKEVEKESQPRMYMHIQTEMNEKMRAILIDWLLEVHIKFELNLETLYLTVNIIDRFLSVKAVPKRELQLVGISALLIASKYEEIWPPQVNDLVYVTDNAYSSRQILVMEKAILGNLEWYLTVPTQYVFLVRFIKASMSDPEMENMVHFLAELGMMHYDTLTFCPSMQAASAVYTARCSLNKSPAWTDTLQFHTGYTESEIMDCSKLLAFLHSRCGESRLRAVYKKYSKAENGGVAMVSPAKSLLSAAADWKKPVSS

SEQ ID NO: 7273 - DNA, 1290 bp, Arabidopsis thaliana
  CDS (1)..(1290)
atggttaactcatgcgagaacaaaatcttcgttaaacccacttcaacgacgattcttcaagatgaaacaagaagtagaaaattcggacaagagatgaagagggagaagagaagagtgttgcgtgtgattaaccagaatctcgctggtgcaagagtttatccttgtgttgtcaacaagaaaggaagcttattgtctaataagcaagaagaagaagaaggatgtcaaaagaagaagtttgattctttgcgtccttcagttacaagatctggagttgaggaagagactaacaagaagctgaagccctcagttccaagtgctaacgacttcggtgattgtatatttattgatgaggaggaagctacattggaccttccaatgccaatgtcgcttgagaaaccatacattgaagctgatccaatggaagaagttgagatggaggatgtaacagtggaagaaccgatcgtggatatcgatgtcttagactcgaagaactcgcttgcggctgttgaatatgttcaagatctttacgcattttacagaacaatggagagatttagttgtgttccagtagactatatgatgcaacaaatcgacttaaacgagaagatgagagcaatactaatcgactggttaatcgaggtacatgacaagtttgatctgatgaacgagacactgtttctgacagtgaatctgatagatagattcttgtccaagcaaaatgttatgagaaagaagcttcagcttgtagggttagtagctttgctgttagcttgtaagtatgaggaggtttcggttcctgttgtcgaagatttagtactcatttcggacaaagcgtatacgaggaacgatgttctagagatggagaaaacaatgttgagtactttgcaattcaatatctcgttaccgacacaatacccgttcttgaaaagattcctcaaggcagctcaagcagacaagaagtgtgaggtcttggcgtcgttcttgatcgagcttgcccttgtggagtacgagatgcttcggtttccaccatcattactagctgccacatctgtgtacactgctcaatgtacacttgatggttccaggaaatggaacagtacatgtgaattccattgtcattactctgaagaccagctcatggaatgttcacggaagctggtgagtctgcatcagagggcggcgacaggaaacttaacaggagtatataggaagtacagcacaagcaaatttggttacatagcaaaatgtgaagctgcacactttctagtgtctgagtctcatcattcttaa

SEQ ID NO: 7274 - protein, 429 aa, Arabidopsis thaliana
MVNSCENKIFVKPTSTTILQDETRSRKFGQEMKREKRRVLRVINQNLAGARVYPCVVNKKGSLLSNKQEEEEGCQKKKFDSLRPSVTRSGVEEETNKKLKPSVPSANDFGDCIFIDEEEATLDLPMPMSLEKPYIEADPMEEVEMEDVTVEEPIVDIDVLDSKNSLAAVEYVQDLYAFYRTMERFSCVPVDYMMQQIDLNEKMRAILIDWLIEVHDKFDLMNETLFLTVNLIDRFLSKQNVMRKKLQLVGLVALLLACKYEEVSVPVVEDLVLISDKAYTRNDVLEMEKTMLSTLQFNISLPTQYPFLKRFLKAAQADKKCEVLASFLIELALVEYEMLRFPPSLLAATSVYTAQCTLDGSRKWNSTCEFHCHYSEDQLMECSRKLVSLHQRAATGNLTGVYRKYSTSKFGYIAKCEAAHFLVSESHHS

SEQ ID NO: 7275 - DNA, 1290 bp, Arabidopsis thaliana
  CDS (1)..(1290)
atggttaatccagaggagaacaatcgtaatctcgttgtcaaacccattacagagattcttcaagatgatgataagagaagcagaaaattcggtgtagagatgaagagacagaacaggagagcattgggtgtgattaatcacaatctcgttggtgcaaaagcttatccttgtgttgttaacaagagaagaggcttatctcagagaaaacaagaaagctgtgacaagaagaagcttgattcattgcatccgtcaatttcaaggtctcaggaagagactaagaagctgaaaccaagtggaaacgagtttggtgattgcatattcattgatgaagaagaggagaagaatgaagaagttacattggaccaacctatgccaatgtcattggaggaaccatacattgaatttgatccaatggaggaagaagttgagatggaggatatggaagaagaacaagaagaaccagttttggatatagacggatacgatgcaaacaactctcttgcagctgttgaatacgtccaagatctttacgatttctaccgtaaaaccgagagatttagctgtgttcctctagattacatggcgcaacagtttgatatatctgacaaaatgagagcaatacttattgactggctcatcgaggtacatgataagtttgagctgatgaacgagacattgtttctaacagtcaatctgatagatagattcttgtccaagcaagctgttgcaagaaagaagcttcagcttgttggtttagttgcattgctcttagcttgcaagtacgaagaggtttcagtacctattgttgaagatttggtagtcatttcggacaaagcttatacgaggaccgatgttttagaaatggagaagattatgcttagtactttgcaattcaatatgtcgttaccaacgcaataccctttcttgaagaggttcctcaaggcagctcaatcagacaagaagcttgagatcttggcgtcgttcttgattgagcttgctcttgtggactacgaaatggttcggtatccaccatcgttactcgccgccactgccgtgtacacagctcaatgtacaatccatggcttcagtgaatggaacagcacttgtgaattccattgtcactactctgagaatcaactcctagaacgttgtagaagaatggtgagactacatcagaaagctgggactgataaactaacaggagtacatagaaaatacagctcctccaaattcggatacatagcaacaaagtatgaagctgcacactttcttgtgtcagattctcactaa

SEQ ID NO: 7276 - protein, 429 aa, Arabidopsis thaliana
MVNPEENNRNLVVKPITEILQDDDKRSRKFGVEMKRQNRRALGVINHNLVGAKAYPCVVNKRRGLSQRKQESCDKKKLDSLHPSISRSQEETKKLKPSGNEFGDCIFIDEEEEKNEEVTLDQPMPMSLEEPYIEFDPMEEEVEMEDMEEEQEEPVLDIDGYDANNSLAAVEYVQDLYDFYRKTERFSCVPLDYMAQQFDISDKMRAILIDWLIEVHDKFELMNETLFLTVNLIDRFLSKQAVARKKLQLVGLVALLLACKYEEVSVPIVEDLVVISDKAYTRTDVLEMEKIMLSTLQFNMSLPTQYPFLKRFLKAAQSDKKLEILASFLIELALVDYEMVRYPPSLLAATAVYTAQCTIHGFSEWNSTCEFHCHYSENQLLERCRRMVRLHQKAGTDKLTGVHRKYSSSKFGYIATKYEAAHFLVSDSH

SEQ ID NO: 7277 - DNA, 2319 bp, Mus musculus
  CDS (96)..(1388)
ggtgcggcggaggaacggctgttagtgtttagctgtggatagccagaggttagggtgtcttctcgaatcggggaacctctgattttggaggagccatggcgctcagggtcactaggaacacgaaaattaacgcagaaaataaggccaaggtcagtatggcaggcgccaagcgtgtgcctgtgacagttactgctgcttccaagcccgggctgagaccgagaactgctcttggagacattggtaataaagtcagcgaagagctacaggcaagagtgcctctgaaaagggaagcaaaaacgctaggtactggaaaaggtactgttaaagccctaccaaaacctgtagagaaggtgcctgtgtgtgaaccagaggtggaacttgctgagcctgagcctgaacctgaacttgaacatgttagagaagagaagctttctcctgaacctattttggttgataatccctctccaagcccgatggaaacatctggatgtgcgcctacagaagagtatctgtgtcaggctttctctgatgtaatccttgcagtgagtgacgtagacgcagatgatggggctgacccaaacctctgtagtgaatatgtgaaagatatctatgcttatctccgacaactggaggaagagcagtcagttagaccaaaatacctacagggtcgtgaagtgactggaaacatgagagctatcctcattgactggctaatacaggttcagatgaaatttaggctgcttcaggagaccatgtacatgactgtgtccattattgatcggttcatgcagaacagttgtgtgcccaagaagatgctacagctggtcggtgtaacggccatgtttattgcaagcaaatatgaggagatgtaccctccagaaataggtgacttcgcctttgtgactaacaacacgtacactaagcaccagatcagacagatggagatgaagattctcagagttctgaacttcagcctgggtcgccctctgcctctgcacttcctccgtagagcatctaaagtcggagaggttgacgtcgagcagcacactttggccaaatacctcatggagctctccatgctggactacgacatggtgcattttgctccttctcaaattgcagctggggctttctgcttagcgctgaaaattcttgacaacggtgaatggacaccaactctgcagcactacctatcctacagtgaagactccctgcttcctgttatgcagcacctggctaagaatgtagtcatggtgaactgtggcctcacaaagcacatgactgtcaagaacaagtatgcagcatctaagcatgctaagatcagcacgctggcacagctgaactgtacactagttcagaatttgtctaaggccgtgacaaaggcataactccaatagactgctacatctgcagatgcagttggcaccatgtgccgcctgtacataggatacctaccgtgtttacttgctcttcaataaaggttgtgacttctcattttacatagcttaactcatttgaatgttgttgcttctgagtttaggctaacggaagttgtcgaatttaggagtatattaaaaactgcatctagttttaacagtggatccaactaatgtatatatctgtagcctatatgtctatatacatccttcactgtgtgtccttatatcatcatgtcttctgcctcactctagtttaaactctaaatctaccagctagtcctttgttccattttccagtggttgccacctttaaccactgtctcttggtttgtcaactttcagatctgaaaccaagtatctttttttatgtaattatttatttgttcttaattggaaaataggatgttcaaaattaaaggtgtgttttaaaaagaatttgcccccaagtctcactatcaacagataagggtgtattcttgtatatcctgtatagatataatcatgcatatactcccaaggagatatttttatatgggttcattttatcaacagtattcctatcagcattcctttcaatgcctatattgcatttcctagtgtgaacaaactgtgtgtaacatagtcattccctcggtgggattcaagtgcattctctcagtgccctccacagtgttcttaaatgatgtttaatgtcttgcttggcttcattcatagtagctcttccaggggtgtgctttgaattctgacagccagatgggtgtggctgccaccataccaaggcgccactcctgtcttgtaatgccacctggaaaagaatcctgtctcatttgctgttttaatttatacatctgatatcaagttgaataaaatttattggtgg

SEQ ID NO: 7278 - protein, 430 aa, Mus musculus
MALRVTRNTKINAENKAKVSMAGAKRVPVTVTAASKPGLRPRTALGDIGNKVSEELQARVPLKREAKTLGTGKGTVKALPKPVEKVPVCEPEVELAEPEPEPELEHVREEKLSPEPILVDNPSPSPMETSGCAPTEEYLCQAFSDVILAVSDVDADDGADPNLCSEYVKDIYAYLRQLEEEQSVRPKYLQGREVTGNMRAILIDWLIQVQMKFRLLQETMYMTVSIIDRFMQNSCVPKKMLQLVGVTAMFIASKYEEMYPPEIGDFAFVTNNTYTKHQIRQMEMKILRVLNFSLGRPLPLHFLRRASKVGEVDVEQHTLAKYLMELSMLDYDMVHFAPSQIAAGAFCLALKILDNGEWTPTLQHYLSYSEDSLLPVMQHLAKNVVMVNCGLTKHMTVKNKYAASKHAKISTLAQLNCTLVQNLSKAVTKA

SEQ ID NO: 7279 - DNA, 2338 bp, Mus musculus
  CDS (99)..(1391)
gggcgtgctgcggaggaacggctgttagtgtttagctgtggatagccagaggttagggtgtcttctcgaatcggggaacctctgattttggaggagccatggcgctcagggtcactaggaacacgaaaattaacgcagaaaataaggccaaggtcagtatggcaggcgccaagcgtgtgcctgtgacagttactgctgcttccaagcccgggctgagaccgagaactgctcttggagacattggtaataaagtcagcgaagagctacaggcaagagtgcctctgaaaagggaagcaaaaacgctaggtactggaaaaggtactgttaaagccctaccaaaacctgtagagaaggtgcctgtgtgtgaaccagaggtggaacttgctgagcctgagcctgaacctgaacttgaacatgttagagaagagaagctttctcctgaacctattttggttgataatccctctccaagcccgatggaaacatctggatgtgcgcctgcagaagagtatctgtgtcaggctttctctgatgtaatccttgcagtgagtgacgtagacgcaggtgatggggctgacccaaacctctgtagtgaatatgtgaaagatatctatgcttatctccgacaactggaggaagagcagtcagttagaccaaaatacctacagggtcgtgaagtgactggaaacatgagagctatcctcattgactggctaatacaggttcagatgaaatttaggctgcttcaggagaccatgtacatgactgtgtccattattgatcggttcatgcagaacagttgtgtgcccaagaagatgctacagctggtcggtgtaacggccatgtttattgcaagcaaatatgaggagatgtaccctccagaaataggtgacttcgcctttgtgactaacaacacgtacactaagcaccagatcagacagatggagatgaagattctcagagttctgaacttcagcctgggtcgccctctgcctctgcacttcctccgtagagcatctaaagtcggagaggttgacgtcgagcagcacactttggccaaatacctcatggagctctccatgctggactacgacatggtgcattttgctccttctcaaattgcagctggggctttctgcttagcgctgaaaattcttgacaacggtgaatggacaccaactctgcagcactacctatcctacagtgaagactccctgcttcctgttatgcagcacctggctaagaatgtagtcatggtgaactgtggcctcacaaagcacatgactgtcaagaacaagtatgcagcatctaagcatgctaagatcagcacgctggcacagctgaactgtacactagttcagaatttgtctaaggccgtgacaaaggcataactccaatagactgctacatctgcagatgcagttggcaccatgtgccgcctgtacataggatacctaccgtgtttacttgctcttcaataaaggttgtgacttctcattttacatagcttaactcatttgaatgttgttgcttctgagtttaggctaacggaagttgtcgaatttaggagtatattaaaaactgcatctagttttaacagtggatccaactaatgtatatatctgtagcctatatgtctatatacatccttcactgtgtgtccttatatcatcatgtcttctgcctcactctagtttaaactctaaatctaccagctagtcctttgttccattttccagtggttgccacctttaaccactgtctcttggtttgtcaactttcagatctgaaaccaagtatctttttttatgtaattatttatttgttcttaattggaaaataggatgttcaaaattaaaggtgtgttttaaaaagaatttgcccccaagtctcactatcaacagataagggtgtattcttgtatatcctgtatagatataatcatgcatatactcccaaggagatatttttatatgggttcattttatcaacagtattcctatcagcattcctttcaatgcctatattgcatttcctagtgtgaacaaactgtgtgtaacatagtcattccctcggtgggattcaagtgcattctctcagtgccctccacagtgttcttaaatgatgtttaatgtcttgcttggcttcattcatagtagctcttccaggggtgtgctttgaattctgacagccagatgggtgtggctgccaccataccaaggcgccactcctgtcttgtaatgccacctggaaaagaatcctgtctcatttgctgttttaatttatacatctgatatcaagttgaataaaatttattggtggaaagctttcacaattc

SEQ ID NO: 7280 - protein, 430 aa, Mus musculus
MALRVTRNTKINAENKAKVSMAGAKRVPVTVTAASKPGLRPRTALGDIGNKVSEELQARVPLKREAKTLGTGKGTVKALPKPVEKVPVCEPEVELAEPEPEPELEHVREEKLSPEPILVDNPSPSPMETSGCAPAEEYLCQAFSDVILAVSDVDAGDGADPNLCSEYVKDIYAYLRQLEEEQSVRPKYLQGREVTGNMRAILIDWLIQVQMKFRLLQETMYMTVSIIDRFMQNSCVPKKMLQLVGVTAMFIASKYEEMYPPEIGDFAFVTNNTYTKHQIRQMEMKILRVLNFSLGRPLPLHFLRRASKVGEVDVEQHTLAKYLMELSMLDYDMVHFAPSQIAAGAFCLALKILDNGEWTPTLQHYLSYSEDSLLPVMQHLAKNVVMVNCGLTKHMTVKNKYAASKHAKISTLAQLNCTLVQNLSKAVTKA

SEQ ID NO: 7281 - DNA, 1287 bp, Medicago sativa
  CDS (1)..(1287)
atgaagttttctgaggagaacaatgtttctaacaaccccacaaattttgaaggagggttagattctagaaaggttgggcaaaacagaagagcattgggtgtgattaatcagaatttggttgtggaaggacgtccttatccttgtgttgttaacaagagggcattgtcagagagaaatgatgtttgtgagaagaaacaagcggatccggttcatcgacccatcactaggaggtttgctgcaaagattgctaacacaaaaacaactaatgctgagggaactaccaaaaggtcaaacttggcaaaatcaagttcaaatggatttggagatttcatatttgttgatgatgaacacaagccagtggaggatcagccagtgccaatggctttagagcaaacagaaccaatgcatagcgaatcagatcggatggaggaagttgagatggaggatatcatggaagagcctgttatggacattgacacccctgatgcaaatgaccctcttgcagttgctgaatatatcgaagatctttactcttactacagaaaagttgagagtactagctgtgtttcaccaaactatatggcacagcaatttgacattaatgaaaggatgagagctatactggttgactggcttattgaggtgcatgacaaattcgacctcatgcatgagacattgtttctcactgtcaatcttatagacagatttttggaaaagcagtctgtggtaagaaagaagcttcagttggttggtctagtggcaatgcttttggcatgcaagtatgaggaagtttcagtgcctgtggttggagatctaattcttatatcagacagagcatacacccggaaagaagttctggaaatggagaaggtgatggtaaatgcattgaagtttaacatatctgtgccaacagcctatgttttcatgagaaggttcttaaaggcggctcaagcagacagaaaacttgagctgctagctttcttcttgattgagctatctcttgtagaatatgcaatgttgaagttctctccttctcaactagctgccgctgctgtctatacagctcaatgcactatgtatggtgtcaaacagtggagtaagacatgtgaatggcacaccaactactctgaagatcaactcttagaatgctctagtttaatggttgactttcacaagaaggctgggacagggaaacttacaggagcacataggaagtattgcacatcaaaatttagctatactgcgaaatgtgaaccagcaagttttcttctggagaacgagttgtag

SEQ ID NO: 7282 - protein, 428 aa, Medicago sativa
MKFSEENNVSNNPTNFEGGLDSRKVGQNRRALGVINQNLVVEGRPYPCVVNKRALSERNDVCEKKQADPVHRPITRRFAAKIANTKTTNAEGTTKRSNLAKSSSNGFGDFIFVDDEHKPVEDQPVPMALEQTEPMHSESDRMEEVEMEDIMEEPVMDIDTPDANDPLAVAEYIEDLYSYYRKVESTSCVSPNYMAQQFDINERMRAILVDWLIEVHDKFDLMHETLFLTVNLIDRFLEKQSVVRKKLQLVGLVAMLLACKYEEVSVPVVGDLILISDRAYTRKEVLEMEKVMVNALKFNISVPTAYVFMRRFLKAAQADRKLELLAFFLIELSLVEYAMLKFSPSQLAAAAVYTAQCTMYGVKQWSKTCEWHTNYSEDQLLECSSLMVDFHKKAGTGKLTGAHRKYCTSKFSYTAKCEPASFLLENEL

SEQ ID NO: 7283 - DNA, 1155 bp, Nicotiana tabacum
  CDS (1)..(1155)
atgaagaagcaagagaaagaggcaataatggcggatttagaaaattgtggcagagttacacggctagccaagaaaagggcagcagaggctatggcctcacatcaacaacaacaccctagtaagaaacgggtggttttgggcgagattcagaatttttctaatctgggtgtgagtcaaattaagggtttgaacactgagcctaaaaaacaacccaaatcgaagcagcagcaatctaagaggaaactgaaaagggctgtgactagtaaaattgataaggaggagttgaatgtggataatgttgatgctaattacgatgaccctcagatgtgtagtgcttatgtttctgatatatatgattatcttcgtaaaatggagattgaggaaaagaggagacctttgcctgattacttagagaaagttcagaaggatttgagcccaaacatgagaggggtattagtcgattggctagtggaagttgcagaggaatacaagctactttcagacactttatatcttgctgtttcctacatcgatagattcttatcaacaaatgtcatcaccaggcaaaaacttcagcttttgggtgtttcgtcaatgctcatttctgcgaagtatgaggagattagtccaccacatgttgaagatttttgttacataacggataacacatatactaaggaagaggtggtgaaaatggaagctgatgtgcttaaaacactcaactttgagatgggaaatcccacagtgaaaacatttctcagaagatttactggggttgctcaagaagattataaaacccccaatttgcagttggagtttttgggctattacctagcggagttaagcatattggattatagctgtgtgaaatacgtaccttctttgctggctgctgctgtggtattcctttcgaggtttacactacaacctaatacacatccttggagtttggctcttcaacaatactcgggatataaagcagcggatttgaaggaatgtattcttatcttacacgacttgcaattaagtagaagaggaggctctttagcggctgtgagggacaaatataagcagcataagtttaagtgtgtgtcatcgttgacctctccagtggaaataccagcttcattctttgaagatatgagacaattgtaa

SEQ ID NO: 7284 - protein, 384 aa, Nicotiana tabacum
MKKQEKEAIMADLENCGRVTRLAKKRAAEAMASHQQQHPSKKRVVLGEIQNFSNLGVSQIKGLNTEPKKQPKSKQQQSKRKLKRAVTSKIDKEELNVDNVDANYDDPQMCSAYVSDIYDYLRKMEIEEKRRPLPDYLEKVQKDLSPNMRGVLVDWLVEVAEEYKLLSDTLYLAVSYIDRFLSTNVITRQKLQLLGVSSMLISAKYEEISPPHVEDFCYITDNTYTKEEVVKMEADVLKTLNFEMGNPTVKTFLRRFTGVAQEDYKTPNLQLEFLGYYLAELSILDYSCVKYVPSLLAAAVVFLSRFTLQPNTHPWSLALQQYSGYKAADLKECILILHDLQLSRRGGSLAAVRDKYKQHKFKCVSSLTSPVEIPASFFEDMRQL

SEQ ID NO: 7285 - DNA, 1452 bp, Nicotiana tabacum
  CDS (1)..(1452)
atggcgacgacccagaatagacgttcgtcagtttcgagtgcgacgacaaagaggcaagcgatgacgtctaattcgtcgttggagaataataatcatgggaaattggtggccaagaaacgaccagccctcactaatatcagtaatcatacaactgcctccgctcgtaactcgctctctcactcctccaaactcgcaccatgtacatccaaggctgtaagcattaagaagagcaatagtaatgcagcttcctcagttctgccaacatcctcctttgtcaaaccaatcagcaaaactgtgtctattccaagaagtgatgcagctatccctaagatcactgccattcctcttcctgctacttgcagcatggacatttctccatctcactcggacggatcattggtctccatggatgaaactatgtccacttctgactcactgagaagtccggatgttgagtacattgacgacaaccaaacagctgcattcgattccattgagaagaaggcgtttagcaccctctacatctcagaagatgtcaaagcagcagatatatgcaagagagatgtacttgtagacatcgaatcaggggataaaattgccaacattgataacaattttgttgatccacaattatgtgctacaatggcctgtgacatatacaaacacttgagagccacagaggtaaagaaaaggccttccacagatttcatggagaaagttcagaaggacatcaacgctagcatgcgtgctattttgattgactggcttgttgaggttgccgaggaatacaggcttgtcccggacacattgtatctgactgttaactacattgatcgatatctctccggcaatttgatggacaggcaacgactacagttgcttggagtagcttgcatgatgatcgcatccaaatatgaggagatctgtgcgcctcaagtagaagagttctgctacatcacagacaacacttacttcaaggaggaggttttacaaatggagtctaccgttttaaattacttgaagtttgaaatgacagccccaacagccaaatgttttctgagaaggttcgttcgtgctgctcaaggacttaatgaggttctgtcactgcagttggaacacttggccagctacatagcagaactctctcttttagagtacaacatgctttgttatgctccatcagtcattgctgcttctgcaattttcttagccaaatatattcttctcccctcaaagaaaccttggaactctaccttgaggcattatactctgtatcaaccctctgatctacgagactgtgtcgtggcactacatagcctttgttgcaacaacaacaattctagtttaccagcaatcagggaaaaatacagccagcacaagtacaaatttgttgcaaagaagtattgccctccaacaatacctgtagagttcttccagaacataagctgctaa

SEQ ID NO: 7286 - protein, 483 aa, Nicotiana tabacum
MATTQNRRSSVSSATTKRQAMTSNSSLENNNHGKLVAKKRPALTNISNHTTASARNSLSHSSKLAPCTSKAVSIKKSNSNAASSVLPTSSFVKPISKTVSIPRSDAAIPKITAIPLPATCSMDISPSHSDGSLVSMDETMSTSDSLRSPDVEYIDDNQTAAFDSIEKKAFSTLYISEDVKAADICKRDVLVDIESGDKIANIDNNFVDPQLCATMACDIYKHLRATEVKKRPSTDFMEKVQKDINASMRAILIDWLVEVAEEYRLVPDTLYLTVNYIDRYLSGNLMDRQRLQLLGVACMMIASKYEEICAPQVEEFCYITDNTYFKEEVLQMESTVLNYLKFEMTAPTAKCFLRRFVRAAQGLNEVLSLQLEHLASYIAELSLLEYNMLCYAPSVIAASAIFLAKYILLPSKKPWNSTLRHYTLYQPSDLRDCVVALHSLCCNNNNSSLPAIREKYSQHKYKFVAKKYCPPTIPVEFFQNISC

SEQ ID NO: 7287 - DNA, 1275 bp, Zea mays
  CDS (1)..(1275)
atggagaatctgagatctcaaaactgccaccaaggtgttgccatggagggagtcaagtttgcgccggagaaggccaacaccaaccggagagccctcagcgacatcaagaacataataggaggcccacaccagcacttggcggtcagcaagagggctctgtcagaaaaaccagctgctgctgctgctgcaaatgctaaagatcaagctggctttgttggacaccgtccagtcaccaggaaattcgctgcaacattggcaacccaacctacagttgcccttctggacccaattggaagtgaaagactgaaaagaaacgctgatacggcatttcacacacctgcagatatggaaagcacaaaaatgacagatgacagtcccttgcctatggtgtcggagatggatgaaatgatgagtcctgaactgaaagagatcgagatggaagatattgaggaggcagcacctgatattgacagtggtgatgcaggaaattctctggctgtggctgactatgtagatgaaatttacagattttacaggaaaactgagggtgcaagctgcgtccctacaaattatatgtcaagccaaactgatataaatgagaagatgcgtggcattctaattgactggctcatagaggtacactacaaactagagctgttggaggagacccttttcctaaccgtgaacatcatagacagattcttggcacgtgaaaatgtggtgcggaagaagcttcagttagctggtgtaactgctatgttgctcgcgtgcaagtatgaagaagtgagcgtacctgtggtcgaggatctgatcttgatctgtgatcgtgcatacacaagggctgacattcttgagatggagaggaggatagtgaacacacttaatttcaatatgtcggtgccgactccatactgtttcatgagaaggtttctaaaggcagcacaatcagagaagaagctcgaactcctgtctttcttcatgatcgagttgagtcttgtcgaatatgagatgctccagttctgcccgtctatgctagcagccgctgccatctacaccgctcaatgcaccataaatgggttcaagtcctggaacaaatgctgtgaactgcacacaagatattcagaagaacatctaatggtttgctctaggatgatggttgaactgcaccaaagagcagctcatgggaaacttacaggggtccatagaaagtacaacacttctagatatagctatgctgcgaaatcggaacccgcaactttcttgctggatgcctga

SEQ ID NO: 7288 - protein, 424 aa, Zea mays
MENLRSQNCHQGVAMEGVKFAPEKANTNRRALSDIKNIIGGPHQHLAVSKRALSEKPAAAAAANAKDQAGFVGHRPVTRKFAATLATQPTVALLDPIGSERLKRNADTAFHTPADMESTKMTDDSPLPMVSEMDEMMSPELKEIEMEDIEEAAPDIDSGDAGNSLAVADYVDEIYRFYRKTEGASCVPTNYMSSQTDINEKMRGILIDWLIEVHYKLELLEETLFLTVNIIDRFLARENVVRKKLQLAGVTAMLLACKYEEVSVPVVEDLILICDRAYTRADILEMERRIVNTLNFNMSVPTPYCFMRRFLKAAQSEKKLELLSFFMIELSLVEYEMLQFCPSMLAAAAIYTAQCTINGFKSWNKCCELHTRYSEEHLMVCSRMMVELHQRAAHGKLTGVHRKYNTSRYSYAAKSEPATFLLDA

SEQ ID NO: 7289 - DNA, 1509 bp, Zea mays
  CDS (1)..(1509)
atgtcgacccacgccgcctcccgccgctcctcctcctcgtccgcggtcgccaagcgccccgcgatagcggagggagctaccaaggcggcgggaccgggccccaccgccgcgcaggcgaagaagcgcaccgcgctcgtcaacatcaccaacgtcgccgctccgggggcgagggtcgccgccgttgggaaggtcgcgccaccggtcaccggcgcgaagttgaatccagctacctcaggtgcacccttaaagaagccatctttggcaaatgctcgcaccatccggggttctgctgcgaagtcggcttccatcaagccagctccaccagtatcacgccatgacagcagctcagagcagaagcataatgttcctgtgcctaccactgtccatgtgccaagtcgtgctcctgccttggtaccctacagcagtttcgtgtctcctggacgttcaggagattcagtttctactgatgagacgatgtcgacttgtgactccatgaaaagcccggacttcgagtacatagacaatgggggttgctcgatgctggcttcgttgcagcgacgggcggatgaacatctgcgtacatcagaggacagagacgttgaagaaaataagtggaagaaaaatggccctgccccaatggaaatcgacagcatctgtgaagttgacagtaacttcgaggatccacagttgtgcgccgctctggcttctgacatctacatgcatctgcgagaagctgagatgaagaaaagaccatcgactgatttcatggagacgattcaaaaggatgtcaaccctagcatgagggcaattttgatagactggctcgtggaagttgctgaagaatatcgtcttgctcctgataccttgtacctgacagtcaactacatcgaccgttatctttctggcaacgagatcaatcgccaaaggctgcaattacttggtgttgcttgcatgcttatagcggcaaaatacgaggagatatgtgcaccccaggttgaagaattctgctacataacagacaatacatacttcagagacgaggttctagaaatggaagcttctgtgctgaactacttgaagtttgaaatgacagcgcctacggcaaagtgtttcttgaggagatttgctcgttctgcacaggcgtgtgatgaggatcctgctctgcatctggagttcctggccaattacatcgctgagctatccctgctggagtacagtcttctgtcttaccctccatcactaatcgctgcctcagctattttcttggcgagatttgtactccagccaacgaagtatccttggaactccacgcttgctcactacacgcagtacaagccgtccgaattgagcgagtgtgtaaaggcactgcaccgcctttccagtgttggtcctgggagcaacctcccagcaatcagagaaaagtacagccagcacaaatacaaatttgtcgcgaagaagcagtccccgccacaaatccctgccgaattcttcagggatgcggcatgctag

SEQ ID NO: 7290 - protein, 502 aa, Zea mays
MSTHAASRRSSSSSAVAKRPAIAEGATKAAGPGPTAAQAKKRTALVNITNVAAPGARVAAVGKVAPPVTGAKLNPATSGAPLKKPSLANARTIRGSAAKSASIKPAPPVSRHDSSSEQKHNVPVPTTVHVPSRAPALVPYSSFVSPGRSGDSVSTDETMSTCDSMKSPDFEYIDNGGCSMLASLQRRADEHLRTSEDRDVEENKWKKNGPAPMEIDSICEVDSNFEDPQLCAALASDIYMHLREAEMKKRPSTDFMETIQKDVNPSMRAILIDWLVEVAEEYRLAPDTLYLTVNYIDRYLSGNEINRQRLQLLGVACMLIAAKYEEICAPQVEEFCYITDNTYFRDEVLEMEASVLNYLKFEMTAPTAKCFLRRFARSAQACDEDPALHLEFLANYIAELSLLEYSLLSYPPSLIAASAIFLARFVLQPTKYPWNSTLAHYTQYKPSELSECVKALHRLSSVGPGSNLPAIREKYSQHKYKFVAKKQSPPQIPAEFFRDAAC

SEQ ID NO: 7291 - DNA, 1605 bp, Cryptococcus neoformans var
  CDS (1)..(1605)
atgcctagtggtatccctactcgccgcgtccgtctggtcgacgagaatgccccacctccccccggcgccgttgtcacccgtacgcgttctcgggctttggcctccaccacttctactgccaccaacgtgaaaccgaccaccacctctatccctatgatgaaacgacaacgctccactatctcatccgaaaacaagattgtcgacaagtctgatgtgaggcgtaatgctcttggtgaggtacggaatggcaagggcggagaaaaggagaaggagagtgggaagggaaaggtcgtggcaatcgaacgaaagccgttggcgacgactcaggcaaaggcgcaaagagtcacacgttcagcgtctgctcagccggtaatgggtgtcaaggatggagataagaagcgaaaggctgtcattaccagcaaaattccgtctcgttctcgatcgaccggtgctgaacctgctcaagtcgaagtgaaacccactatcaagactgaagaggagcctgttcgtaagcgtcggaaaacgtcgagccccgttgtagaagttggagaggatggaccaacagtggatggaaaggaattgctgttgtcaagtggaagcaaaaatgcgacagccttcaggtcacccaagattaaagccaaggatgacggatggacggatctggatgctgaggacgaaggggacccaacaatggtcagcgaatatgtcgttgaagcttttaagtacatgatggatatccaaggccaaacaatgcccgatcccgagtacatggacaaccaagctgaactccaatggaagatgcgtcaaatcctcatggattggatcatcgaagtccactccaaattccgactcctccccgaaaccctcttcatcgccaccaaccttgttgatcgcttcctctccaagcgcgtcatttccctcgtcaagttccagctagtcggtcttaccgccctctttatcgcatcaaaatatgaagaagtctgttgcccaggtgttgagcatttcctacatatgtcggacggaggatacaccgtcgaggaattgcttaaagcagagcgttacatgttgtccacgttgcaattcgacatgtcgtaccctaacccgctcaattttataaggcggatcagtaaagccgatgggtacgatatccaatcgaggacggttgcaaagtatcttgtcgagattagttgtgtcgaccatcggcttttgggttatacacctagtatgttggctgccgcgtccatgtggctcgcgagattatgtcttgagcgtggggaatggaacgcgaaccttgtgcactactcgacgtattccgaagatgagattcgtccttgtgcgcaggtcatgttggatcgtattctcgatcccgatttcgacgagtctacttcattctacaaaaagtatgcaagcaagaaacacatgaaggcgagtgtgtacgtacgcgaatgggcaactcagctgtggcctgcgtcggcggatgggagtgcagttgagaggggcacagagcttgaacttttaaagatgtttttggaggatgaagaggaagagaataacaaggggagtaagaggaggatgaaggcggttgatgaggaagaggagtattaa

SEQ ID NO: 7292 - protein, 534 aa, Cryptococcus neoformans var
MPSGIPTRRVRLVDENAPPPPGAVVTRTRSRALASTTSTATNVKPTTTSIPMMKRQRSTISSENKIVDKSDVRRNALGEVRNGKGGEKEKESGKGKVVAIERKPLATTQAKAQRVTRSASAQPVMGVKDGDKKRKAVITSKIPSRSRSTGAEPAQVEVKPTIKTEEEPVRKRRKTSSPVVEVGEDGPTVDGKELLLSSGSKNATAFRSPKIKAKDDGWTDLDAEDEGDPTMVSEYVVEAFKYMMDIQGQTMPDPEYMDNQAELQWKMRQILMDWIIEVHSKFRLLPETLFIATNLVDRFLSKRVISLVKFQLVGLTALFIASKYEEVCCPGVEHFLHMSDGGYTVEELLKAERYMLSTLQFDMSYPNPLNFIRRISKADGYDIQSRTVAKYLVEISCVDHRLLGYTPSMLAAASMWLARLCLERGEWNANLVHYSTYSEDEIRPCAQVMLDRILDPDFDESTSFYKKYASKKHMKASVYVREWATQLWPASADGSAVERGTELELLKMFLEDEEEENNKGSKRRMKAVDEEEEY

SEQ ID NO: 7293 - DNA, 1266 bp, Macaca fascicularis
  CDS (1)..(1266)
atgcactgcagcaaccccaagaatggagttgtgctggctacagtggcccgaggtcccgatgcttgtcagatactcaccagagccccgctgggccaggatcccccgcagaggacagtgctagggctgctaactgaaaatggacagtacaggaggacctgtggccaggggatcacaagaatcaggtgttattctggatcagaaaatgccttccctccagctggaaagaaagcgctccctgactgtggggtccaagagccccccaagcaagggttcgacatctacatggatgaactagagcagggggacggagacagctgttcgggcagagaggggatggcgtttgaggatgtgtatgaagtagacaccagcacactcaagtcagacctgcacttcctgctggatttcaacacagtttctcctatgctggtagattcatctctgctctcccagtctgaagagatatccagtcttggcacagatgtgacaaatgtgactgaatatgctgaagaaatttatcagtaccttagagaagctgaaataaggcacagacccaaagcacactacatgaagaagcagccggacatcacggaaggcatgcgcatgattctggtggactggctggtggaggttggggaagaatataagcttcgagcggagaccctgtatctggctgtcaacttcctggacaggttcctttcatgtatgtctgttctgagagggaaattgcagctcgtgggaacagcagctattcttttggcttcgaaatatgaagagatatatcctcctgaagtagacgagtttgtctatatcactgatgatacatacacaaaacgacaactgttaaaaatggaacacttgcttctgaaagttctagcttttgatctgacagtgccaaccaccaaccaatttctccttcagtacctgaggcgacaaggagtgtgcgtcaggactgagaacctggctaagtatgtagcagagctgagtctacttgaagcagacccattcttgaaatatcttccttcattgatagctgcagcagctttttgcctggcaaactacactgtgaacaagcacttttggccggaaacccttgctgcatttacagggtattcattaagtgaaattgtaccttgcctgagtgagcttcataaagtgtaccttgatataccccatcgacctcagcaggcaattagggagaagtacaaggcttcaaagtacctgcgtgtgtccctcatggagccaccttcagttcttcttctacagtaa

SEQ ID NO: 7294 - protein, 421 aa, Macaca fascicularis
MHCSNPKNGVVLATVARGPDACQILTRAPLGQDPPQRTVLGLLTENGQYRRTCGQGITRIRCYSGSENAFPPAGKKALPDCGVQEPPKQGFDIYMDELEQGDGDSCSGREGMAFEDVYEVDTSTLKSDLHFLLDFNTVSPMLVDSSLLSQSEEISSLGTDVTNVTEYAEEIYQYLREAEIRHRPKAHYMKKQPDITEGMRMILVDWLVEVGEEYKLRAETLYLAVNFLDRFLSCMSVLRGKLQLVGTAAILLASKYEEIYPPEVDEFVYITDDTYTKRQLLKMEHLLLKVLAFDLTVPTTNQFLLQYLRRQGVCVRTENLAKYVAELSLLEADPFLKYLPSLIAAAAFCLANYTVNKHFWPETLAAFTGYSLSEIVPCLSELHKVYLDIPHRPQQAIREKYKASKYLRVSLMEPPSVLLLQ

SEQ ID NO: 7295 - DNA, 1197 bp, Macaca fascicularis
  CDS (1)..(1197)
atggcgctgctccgacgcccgacggtgtccagtgatttggagaatattgacacaggatttaattctaaagttaagagtcatgtgactattaggcgaactgttttagaagaaattggaaataaagttacaaccagagcagcacaagtagctaagaaagctcagaacaccaaagtaccagttcaacccaccaaaacaacaaatgtcaacaaacaactgaaacctactgcttctgtcaaaccagtacagatggaaatgttggccccaaagggtccttctcccacacctgaggatgtctccatgaaggaagagaatctctgccaagctttttctgatgccttgctctgcaaaatcgaggacattgataatgaagattgggagaaccctcagctctgcagtgactacgttaaggatatctatcagtatctcaggcagctggaggttttgcagtccataaacccacatttctcagatggaagagatataaatggacgcatgcgtgccatcctggtggactggctggtgcaggtccactccaagtttaggcttctgcaggagactctgtacatgtgtgttgccattatggatcgatttttacaggttcagccagtttcccggaagaagcttcaattagttgggattactgctctgctcttggcttccaagtatgaggagatgttttctccaaatattgaagactttgtttacatcacagacaacgcttataccagttcccaaatccgagaaatggaaactctaattttgaaagaattgaaatttgagttgggtcgaccgttgccactacacttcttaaggcgagcatcaaaagccggggaagttgatgttgaacagcacactttagccaaatatttgatggagctgactctcatcgactatgatatggtgcattatcatccttctaaggtagcagcagctgcttcctgtttgtctcagaagcttctaggacaaggaaaatggaacttaaagcagcagtattacacaggatacacagagaatgaagtattggaagtcatgcagcacatggccaagaatgtggtgaaagtaaacgaaaacttaactaaattcatcgccatcaagaataagtatgcaagcagcaaactcctgaagatcagcacgatccctcagctgaactcaaaagccgtcaaagatcttgcctccccactgatgggaaggtcctag

SEQ ID NO: 7296 - protein, 398 aa, Macaca fascicularis
MALLRRPTVSSDLENIDTGFNSKVKSHVTIRRTVLEEIGNKVTTRAAQVAKKAQNTKVPVQPTKTTNVNKQLKPTASVKPVQMEMLAPKGPSPTPEDVSMKEENLCQAFSDALLCKIEDIDNEDWENPQLCSDYVKDIYQYLRQLEVLQSINPHFSDGRDINGRMRAILVDWLVQVHSKFRLLQETLYMCVAIMDRFLQVQPVSRKKLQLVGITALLLASKYEEMFSPNIEDFVYITDNAYTSSQIREMETLILKELKFELGRPLPLHFLRRASKAGEVDVEQHTLAKYLMELTLIDYDMVHYHPSKVAAAASCLSQKLLGQGKWNLKQQYYTGYTENEVLEVMQHMAKNVVKVNENLTKFIAIKNKYASSKLLKISTIPQLNSKAVKDLASPLMGRS

SEQ ID NO: 7297 - DNA, 1197 bp, Macaca fascicularis
  CDS (1)..(1197)
atggcgctgctccgacgcccgacggtgtccagtgatttggagaatattgacacaggatttaattctaaagttaagagtcatgtgactattaggcgaactgttttagaagaaattggaaataaagttacaaccagagcagcacaagtagctaagaaagctcagaacaccaaagtaccagttcaacccaccaaaacaacaaatgtcaacaaacaactgaaacctactgcttctgtcaaaccagtacagatggaaatgttggccccaaagggtccttctcccacacctgaggatgtctccatgaaggaagagaatctctgccaagctttttctgatgccttgctctgcaaaatcgaggacattgataatgaagattgggagaaccctcagctctgcagtgactacgttaaggatatctatcagtatctcaggcagctggaggttttgcagtccataaacccacatttcttagatggaagagatataaatggacgcatgcgtgccatcctggtggactggctggtgcaggtccactccaagtttaggcttctgcaggagactctgtacatgtgtgttgccattatggatcgatttttacaggttcagccagtttcccggaagaagcttcaattagttgggattactgctctgctcttggcttccaagtatgaggagatgttttctccaaatattgaagactttgtttacatcacagacaacgcttataccagttcccaaatccgagaaatggaaactctaattttgaaagaattgaaatttgagttgggtcgaccgttgccactacacttcttaaggcgagcatcaaaagccggggaagttgatgttgaacagcacactttagccaaatatttgatggagctgactctcatcgactatgatatggtgcattatcatccttctaaggtagcagcagctgcttcctgtttgtctcagaagcttctaggacaaggaaaatggaacttaaagcagcagtattacacaggatacacagagaatgaagtattggaagtcatgcagcacatggccaagaatgtggtgaaagtagacgaaaacttaactaaattcatcgccatcaagaataagtatgcaagcagcaaactcctgaagatcagcacgatccctcagctgaactcaaaagccgtcaaagatcttgcctccccactgatgggaaggtcctag

SEQ ID NO: 7298 - protein, 398 aa, Macaca fascicularis
MALLRRPTVSSDLENIDTGFNSKVKSHVTIRRTVLEEIGNKVTTRAAQVAKKAQNTKVPVQPTKTTNVNKQLKPTASVKPVQMEMLAPKGPSPTPEDVSMKEENLCQAFSDALLCKIEDIDNEDWENPQLCSDYVKDIYQYLRQLEVLQSINPHFLDGRDINGRMRAILVDWLVQVHSKFRLLQETLYMCVAIMDRFLQVQPVSRKKLQLVGITALLLASKYEEMFSPNIEDFVYITDNAYTSSQIREMETLILKELKFELGRPLPLHFLRRASKAGEVDVEQHTLAKYLMELTLIDYDMVHYHPSKVAAAASCLSQKLLGQGKWNLKQQYYTGYTENEVLEVMQHMAKNVVKVDENLTKFIAIKNKYASSKLLKISTIPQLNSKAVKDLASPLMGRS

SEQ ID NO: 7299 - DNA, 1107 bp, Helobdella triserialis
  CDS (1)..(1107)
atggcattcgctcgttccgttgcagtttctaatttattgaatgccaaagacaaaaaaaatactggaaagattactcatcgaggagcattggggaacatttcaaatgcgccagtcagtaaggcaactgaaggaaagcagttgtccaagctgcctcccgttaagcatgaaaagtgtgaaaagattgaagaagttgaaaataaagctccaattatagttcaacaacaagaagaaataataaaagaaattatattgggacccatagatgatattgacaaagatgacaaggagaatcctcagctaatgagtgaatacgtaaaagacatatacggctatatgagaattcttgaaagcagatatataatcaggcccgactacttgtcagaacaaacagaagtaaatggtagaatgagagccatattagttgactggcttgttcaggttcatttacgattccatttgctacaagaaacgttgttcttgtcagttgccattctagacagatatctacagaaaaatcaagtggcgaagtcaaagttacaactggttggagttacttctgtgtggattgcttcaaagtatgaggagatgcatgccccagaggtggctgactttgtctacatcaccgacaatgcgtacacaaaatcagaaatgagacagatggagtgtaccatcatgaaggcacttgacttccaacttggcagacctctccctattcatttccttcgcagattctcaaaagctggagaggttgaaggagaaacgcataacttggcaaaatattttatggagatgattctggttgaatatgacatggtgcattatctcccatcgaaaattgctgcagctgctttgttgctttcgaagctgatacttgaagggacacaatggacagcatcgctggttcattacagtacatacacagaagccgaacttttacctcttgtgtacaagcttgctagttttgtcataaaaaccaattctgccacaaagttggtggcggtcaagaacaaatttgccagtagcaagtttctccgcataagtaaatcagaaaagttgagcagtcaggttgtggcctcattggccgataagagcggtaatcattcataa

SEQ ID NO: 7300 - protein, 368 aa, Helobdella triserialis
MAFARSVAVSNLLNAKDKKNTGKITHRGALGNISNAPVSKATEGKQLSKLPPVKHEKCEKIEEVENKAPIIVQQQEEIIKEIILGPIDDIDKDDKENPQLMSEYVKDIYGYMRILESRYIIRPDYLSEQTEVNGRMRAILVDWLVQVHLRFHLLQETLFLSVAILDRYLQKNQVAKSKLQLVGVTSVWIASKYEEMHAPEVADFVYITDNAYTKSEMRQMECTIMKALDFQLGRPLPIHFLRRFSKAGEVEGETHNLAKYFMEMILVEYDMVHYLPSKIAAAALLLSKLILEGTQWTASLVHYSTYTEAELLPLVYKLASFVIKTNSATKLVAVKNKFASSKFLRISKSEKLSSQVVASLADKSGNHS

SEQ ID NO: 7301 - DNA, 1197 bp, Homo sapiens
  CDS (1)..(1197)
atggcgctgctccgacgcccgacggtgtccagtgatttggagaatattgacacaggagttaattctaaagttaagagtcatgtgactattaggcgaactgttttagaagaaattggaaatagagttacaaccagagcagcacaagtagctaagaaagctcagaacaccaaagttccagttcaacccaccaaaacaacaaatgtcaacaaacaactgaaacctactgcttctgtcaaaccagtacagatggaaaagttggctccaaagggtccttctcccacacctgaggatgtctccatgaaggaagagaatctctgccaagctttttctgatgccttgctctgcaaaatcgaggacattgataacgaagattgggagaaccctcagctctgcagtgactacgttaaggatatctatcagtatctcaggcagctggaggttttgcagtccataaacccacatttcttagatggaagagatataaatggacgcatgcgtgccatcctagtggattggctggtacaagtccactccaagtttaggcttctgcaggagactctgtacatgtgcgttggcattatggatcgatttttacaggttcagccagtttcccggaagaagcttcaattagttgggattactgctctgctcttggcttccaagtatgaggagatgttttctccaaatattgaagactttgtttacatcacagacaatgcttataccagttcccaaatccgagaaatggaaactctaattttgaaagaattgagatttgagttgggtcgacccttgccactacacttcttaaggcgagcatcaaaagccggggaggttgatgttgaacagcacactttagccaagtatttgatggagctgactctcatcgactatgatatggtgcattatcatccttctaaggtagcagcagctgcttcctgcttgtctcagaaggttctaggacaaggaaaatggaacttaaagcagcagtattacacaggatacacagagaatgaagtattggaagtcatgcagcacatggccaagaatgtggtgaaagtaaatgaaaacttaactaaattcatcgccatcaagaataagtatgcaagcagcaaactcctgaagatcagcatgatccctcagctgaactcaaaagccgtcaaagaccttgcctccccactgataggaaggtcctag

SEQ ID NO: 7302 - protein, 398 aa, Homo sapiens
MALLRRPTVSSDLENIDTGVNSKVKSHVTIRRTVLEEIGNRVTTRAAQVAKKAQNTKVPVQPTKTTNVNKQLKPTASVKPVQMEKLAPKGPSPTPEDVSMKEENLCQAFSDALLCKIEDIDNEDWENPQLCSDYVKDIYQYLRQLEVLQSINPHFLDGRDINGRMRAILVDWLVQVHSKFRLLQETLYMCVGIMDRFLQVQPVSRKKLQLVGITALLLASKYEEMFSPNIEDFVYITDNAYTSSQIREMETLILKELRFELGRPLPLHFLRRASKAGEVDVEQHTLAKYLMELTLIDYDMVHYHPSKVAAAASCLSQKVLGQGKWNLKQQYYTGYTENEVLEVMQHMAKNVVKVNENLTKFIAIKNKYASSKLLKISMIPQLNSKAVKDLASPLIGRS

SEQ ID NO: 7303 - DNA, 2235 bp, Cryptococcus neoformans var
  CDS (434)..(1873)
atcctccttctctcattctcatcttcaccttctctttcatccttccctcaccactaccacatcccctttcctcccctatccccttcctgtgtagcgcttattcccttatcgcctcctcactcgccactaccctactccattcactcgttcaaacggccacttgcgaaagggacaaacatcccatatctccctccattctcgcctctattcaatcaactggacgtctagcgactaccttagtcctggtctagtatccctgtgtcgatcccaacttataaattactctttaatcataatcggtgacagcctgtctttggcgacactcacacacaacactgtatacactccctcaatcaacttgtcagacaccctctagcaccgcaacctcgcaatttcaagtcctcatacgttttacagaacctaaaataacagtatggcttcccgaaatcccgtcgtcacccgtcgagctgccactcgctctcgaaatgatgaaaacgctgctcctcaacaatcagtacgaaccaagccctcaatctcccaccttggccctgcttccaagactgcggctgtcaatgtctccgttgctgctggcaagaagcctgtcgctgtcaaggttggcgccaagaggacagctttgggaggcgtggttgttaacggtaaggaagaaactgaagccgggaagaagcctttgaaggcgagtggcaagactgtcaccgaagctagacagcctcttgcatcccgacagaacaatgctcagccgacacgaccgattgccgccatccctcaccgatccaaagccactcccgccaacgtctatgctccagtagaggctcctgctaagcttactgtcgaggaagatatgcagatggagatcgatgctcgacgatctcagcccgtctccaacgctgctgacttcgccactgtcgatgaggagctcctcgatgacgaatccgaagaggatgacatggaggaagaggatgaagaagattggctgaggatgtctgaagaggagatggtgaaggcgcaagaacaactggacgttgtgcaggcgacttttaaggatgacgttgacatgtttgacaccactatggttgccgagtacgcggacgagattttcgagcacatggagagacttgaggaaagtgttatgcctaaccctcgctacatggacttccagactgagattgagtggaccatgaggacaacacttattgattggcttcttcaagtgcaccttcgttatcacatgctccccgagactctttggatcgctgtcaacattgttgaccgattcctttccacccgagtggtctcccttgtcaagcttcaacttgtcggtgtcaccgccatgttcatcgctgccaagtatgaagagatcctcgctccttctgttgaggaatttgtctacatgactgagaatgggtacaccaaggatgagatcctcaagggcgaaagaatcattctccaaaccctcgatttcaccatctcatcttactgttccccgtactcatgggtcaggcgaatttccaaggccgacgattacgacgttcaaactcgaacactgagcaagttcttgatggaggtcacccttttggaccacaggttcctcagatgtaagcctagcatgatcgctgccatcggaatgtatctcgccaggaagatgttgggcggtgactggaatgacgctttcatctactactccaactttaccgaatctcaactcatcactggcgcatctcttttgtgcgagcgacttattgagcctgactttgagtccgtgtacgtttacaagaagtacgccaacaagaagttcttgcgagcgtctacctttgcgcgagactgggctttgaccaacgccgccaactcatcatgaaaacttgcgagaaaatgacaattccaataaggacaattctcttcctctatttcaaccctatagctccgaattcctgcacatcttcaccttcgctgtttctctcgaacacggttatgtgcttgagtcttgaggatgtccagacataccccttaaactatcctctattagttcttgcacctaagcatttcagttacataacttctcataaccatcatttatacccatagtaccagtaagaagcggtgacaacatccatgtgatataatatgttttcgatcgtgcagctgcggggaccctcgtgggcttgcacattataatagagtatggttagtcatttgctggatgtcagtcatttgtattgt

SEQ ID NO: 7304 - protein, 479 aa, Cryptococcus neoformans var
MASRNPVVTRRAATRSRNDENAAPQQSVRTKPSISHLGPASKTAAVNVSVAAGKKPVAVKVGAKRTALGGVVVNGKEETEAGKKPLKASGKTVTEARQPLASRQNNAQPTRPIAAIPHRSKATPANVYAPVEAPAKLTVEEDMQMEIDARRSQPVSNAADFATVDEELLDDESEEDDMEEEDEEDWLRMSEEEMVKAQEQLDVVQATFKDDVDMFDTTMVAEYADEIFEHMERLEESVMPNPRYMDFQTEIEWTMRTTLIDWLLQVHLRYHMLPETLWIAVNIVDRFLSTRVVSLVKLQLVGVTAMFIAAKYEEILAPSVEEFVYMTENGYTKDEILKGERIILQTLDFTISSYCSPYSWVRRISKADDYDVQTRTLSKFLMEVTLLDHRFLRCKPSMIAAIGMYLARKMLGGDWNDAFIYYSNFTESQLITGASLLCERLIEPDFESVYVYKKYANKKFLRASTFARDWALTNAANSS

SEQ ID NO: 7305 - DNA, 1516 bp, Schistosoma japonicum
  CDS (40)..(1284)
caacttttgatcgatcagctgcatttgaaaatattcagtatgttaactcgcagcagatttggagtttatgccaatgaaaatgccgcagttggtgttaaagatagctttgtacaaaaagcgaaaatcatgggtgtatcaacgaggtcacgcactgctctaggtgatatcaagaacaaggccactagtatgctagttaaagatataggaaagccaaaaagcgtaaaagatgagcagttttccgaacagaaaatggataaacggctcgacatgagtatcgacggcttaactcctgatgtacctactcaaacatatccacataagctcaaagaatttcaagcatgtcgtagaatcgtgagaatggattgcttagcatcacagctggctgaggaattcctagatgttgaccgaaacgattacggagatgcagctacggtttatccgtactctgaacgaatattcaattatttacaagatagagagttgttagtccaacctcttgtagctgactacatggctccaaactgtgaaataactccaagaatgcgttacatcttaataaactggcttgttcaagtacattacagttataaactgcaacctgaaacactttatttatgtgttgctattctcgaccgttatttattgaaaaactcaaaaagtttaacgaaggatgggtttcagttaattggagttgcatctcttttcattgctgctaaatttgaagagatgtatccaccagatataagtgatttctcatcaattacaaacaacacatattcgaaaagtgatatacggaatacagagcaggtgatattgcagtcaatcgatttttacttgtctattccaactccattggtattccttcgtcgcttgtcaaaagctgtggatgctgataggactatgcacaatctggctaaatatttcttagaacttacagtacaagagtatgatctagcacatcttccgggaaatctacgatctgtgactgcgttgtgcttgtcccgagcactatgtttaggcacttcggaacttgaaagggcttggtgtaataaactgtcatatctcagtggttacgtgttggatgatatccgtgattatctgcagattcttgctcgcgccgcttatcgtcaaaattctccttcaaaatatagggcgatatttaacaaatatcgaatggatgatttttatggacgtgtggcctctttgccacagcttcgctcatatctcatggagactttggctgatctcaaattcgatagcgatggcgaggcaaatccagcataatgctatttgaaaaaactgcatacaagtcattatccagtgatacatcgtcacttaattgtctatctgtgtctaggccaatttattttcccaattatttatattctatcacctctggagatttttgattatctcattggaataagtgtatattttagcataatcgccttctctatattaagtgttagtgtataatcttttaatacacacttttatcaaaaaaaaaaaaaaaaaa

SEQ ID NO: 7306 - protein, 414 aa, Schistosoma japonicum
MLTRSRFGVYANENAAVGVKDSFVQKAKIMGVSTRSRTALGDIKNKATSMLVKDIGKPKSVKDEQFSEQKMDKRLDMSIDGLTPDVPTQTYPHKLKEFQACRRIVRMDCLASQLAEEFLDVDRNDYGDAATVYPYSERIFNYLQDRELLVQPLVADYMAPNCEITPRMRYILINWLVQVHYSYKLQPETLYLCVAILDRYLLKNSKSLTKDGFQLIGVASLFIAAKFEEMYPPDISDFSSITNNTYSKSDIRNTEQVILQSIDFYLSIPTPLVFLRRLSKAVDADRTMHNLAKYFLELTVQEYDLAHLPGNLRSVTALCLSRALCLGTSELERAWCNKLSYLSGYVLDDIRDYLQILARAAYRQNSPSKYRAIFNKYRMDDFYGRVASLPQLRSYLMETLADLKFDSDGEANPA

SEQ ID NO: 7307 - DNA, 1197 bp, Bos taurus
  CDS (1)..(1197)
atggcgctgctccgacgcccgacggtgtccaccgatttagagaataatgacacgggagttaattctaaacctaaaagtcatgtgactatcaggcgggcagttttagaagaaattggaaatcgggttacaacccgagccatacaagtagctaagaaagcccagaacactaaagtacctgttccacccaccaaaacaacaaatgtcagcaagcacccgaaacctactgcttctgtgaaaccagtgcagatggatgtgttggctccaaagggtccttctcccacacctcaggacatctccatgaaggaggagaacctctgccaagctttttctgatgccttgctctgcaaaattgaggatattgataccgaggactgggagaaccctcagctctgcagtgactacgtaaaggatatctaccagtatctaaggcagcttgaggttctgcagtccataaacccacatttcctagatgggagagacataaacggccgcatgcgtgccatcctggtggactggctggtgcaagtgcactccaagttcaggctgctgcaggaaacgctgtacatgtgtgttgccgtcatggaccgatatttacaggttcagccagtctctcgtaagaagcttcagctggttggcattacggcactgctcttggcttccaagtatgaggaaatgttttctccaaacatcgaagactttgtttacatcactgacaatgcttataccagttctcaaattcgagaaatggaaactctgattttgaaggaactgaaatttgagctgggtcgaccgttgccactacattttttaaggcgggcatcgaaagctggggaggtcgatgttgaacagcacactttagccaaatacttgatggaactgactctcgttgactatgacatggtgcactatcacccttccaaggtggcggcagccgcttcctgcctgtcccagaaggttctaggccaaggaaaatggaacttaaagcagcagtattacaccggctacacagagagcgaggtgctggaggtcatgcggcacatggccaaaaacgtcgtgcgtgtcagcgagaacatgaccaagttcaccgccatcaagaataagtatgcaagcagcaaactcctgaagatcagcacgattcctcagttgaactcaaaagccatccaggagcttgcctcacctctgctgggacggtcctag

SEQ ID NO: 7308 - protein, 398 aa, Bos taurus
MALLRRPTVSTDLENNDTGVNSKPKSHVTIRRAVLEEIGNRVTTRAIQVAKKAQNTKVPVPPTKTTNVSKHPKPTASVKPVQMDVLAPKGPSPTPQDISMKEENLCQAFSDALLCKIEDIDTEDWENPQLCSDYVKDIYQYLRQLEVLQSINPHFLDGRDINGRMRAILVDWLVQVHSKFRLLQETLYMCVAVMDRYLQVQPVSRKKLQLVGITALLLASKYEEMFSPNIEDFVYITDNAYTSSQIREMETLILKELKFELGRPLPLHFLRRASKAGEVDVEQHTLAKYLMELTLVDYDMVHYHPSKVAAAASCLSQKVLGQGKWNLKQQYYTGYTESEVLEVMRHMAKNVVRVSENMTKFTAIKNKYASSKLLKISTIPQLNSKAIQELASPLLGRS

SEQ ID NO: 7309 - DNA, 1173 bp, Xenopus laevis
  CDS (1)..(1173)
atggctacttgggctgctatgcgtacaggacagatggacaatgcagtcgtgggtggagtggtggcagccaaagtgaaagtacatggacatagacccccactagaagaaatcggtaacaggactgcaattctaggacgcaaacctgcagcaatgaactgcaaggtgcctgtcaaagtggtcagacaagtaacctccagagcaaatctgcctttaagagttaaacaggcatttggccccaaatctgaggaacctcctcccatacctatggatgtagctgataacgaggaggtgttgtgtcaagctttctctgaagctttgaacagtgttgaggatattgatgcagaggattcttcaaaccctcagttatgcgcggattatgtgaaggacatctattcctatttaaggcagttagaggttcaacaggctgtacgcccaagacacctacagggaatggagatcaatgatcggatgagagccattctagtcgactggttaatacaagtccacttaaaatttcaactacttcaagagacattatatatggcaatagcaattatggaccgttttctacagggtcagcctatctcccgaagcaagctacagttggttggtgtcacctcgctcttcatagcttcaaagtatgaagaaatgtattatccagagatttctgactttgtttacatcactgacaacacctactccaaagctcaaattagagaaatggaaatgatgattctcaaggagattaactttgatctaggaagaccgctgccccttaatttccttagaagagcttcaaaatgttgcagtgctgatgcaggacagcacacacttgccaagtacttcatggagttgactctacttgactatgacatggttcacttccatccttcagcaattgctgctgctgctttgtgcctgacccaaaaggttcttaatatgggcacatgggatgctgctctacagttttacacaggctattcacaagatgatcttagcctgcctatgaagcacatggccaagaacatcgttcaggtcaaccaaaacctgtcaaaatttttatctgtgaagaataaatattctagtagtaaattactgaagatcagcacaatccctcaactgaactcgcgtgttttaactggtcttgctgctgctgtaacgccaggctcgtag

SEQ ID NO: 7310 - protein, 390 aa, Xenopus laevis
MATWAAMRTGQMDNAVVGGVVAAKVKVHGHRPPLEEIGNRTAILGRKPAAMNCKVPVKVVRQVTSRANLPLRVKQAFGPKSEEPPPIPMDVADNEEVLCQAFSEALNSVEDIDAEDSSNPQLCADYVKDIYSYLRQLEVQQAVRPRHLQGMEINDRMRAILVDWLIQVHLKFQLLQETLYMAIAIMDRFLQGQPISRSKLQLVGVTSLFIASKYEEMYYPEISDFVYITDNTYSKAQIREMEMMILKEINFDLGRPLPLNFLRRASKCCSADAGQHTLAKYFMELTLLDYDMVHFHPSAIAAAALCLTQKVLNMGTWDAALQFYTGYSQDDLSLPMKHMAKNIVQVNQNLSKFLSVKNKYSSSKLLKISTIPQLNSRVLTGLAAAVTPGS

SEQ ID NO: 7311 - DNA, 1056 bp, Ostreococcus tauri
  CDS (1)..(1056)
atgatcacaggggcgcagggcgtgagacagacgcggtctaagacgacgtacgaggtgccgcaacaacagcagcaacagagcttcgaatggggccggacgtcccaaagaacgagtcacgggaagccgcgtcgcggaagtgtcatgggtggcacgatgacgaccgcgggcgcggatgtggacatgcgcgagtcgtactcgacgtacctcgagcgtagttccgccgcggatgtcatgacggacgcgctgccagatatcgatctttatgaccacgacaatccgctcgcggtcacgcagtatgtgaacgacatttatcagtactggtacaaggttgagcccgatacgcgagtctctgagacgtacatgctcattcaaggtgacatcaactacaagatgcgcgcaatcttgatcgattggcttgtcgaggtccatctcaagttcaagctcatgccagagacgttgttcctcacgacaaatcttatcgaccgatttctagagctcaaaacggtgactcgtaggaacttgcaactcgtgggcgtcacagcgatgctcgtggcgagcaagtatgaagaaatctgggcgcccgaggttcgagactttgtctacatcagtgatcgggcgtacacgcgacaacagattctggagatggagaagcaaatgttaaatacgctggggttccatctcactgttccgacgccgtactgcttcttgaaccgcttcttcaaggctgccggcggcgaccgtcagtttcagttgtacgcgtcgtatgcggtcgagtgcgcgctcccggaatacggtatgctgaaatattcgggcagcactctggccgccgctggagtgtatattgcgatcagaggtcttcaaacgggatcgtggaatcacaccatggaggcgcacactcgcttgtctgagtctgaagtttatccgtgcgcgtgcgacatggctgagctcatgcgcaaggcgcccacggcaacgctcaccgctgtttacaagaagtacagcagcgaaaagttcatgaagattgcgacactaccggtgccgcacgaccttcggctgtga

SEQ ID NO: 7312 - protein, 351 aa, Ostreococcus tauri
MITGAQGVRQTRSKTTYEVPQQQQQQSFEWGRTSQRTSHGKPRRGSVMGGTMTTAGADVDMRESYSTYLERSSAADVMTDALPDIDLYDHDNPLAVTQYVNDIYQYWYKVEPDTRVSETYMLIQGDINYKMRAILIDWLVEVHLKFKLMPETLFLTTNLIDRFLELKTVTRRNLQLVGVTAMLVASKYEEIWAPEVRDFVYISDRAYTRQQILEMEKQMLNTLGFHLTVPTPYCFLNRFFKAAGGDRQFQLYASYAVECALPEYGMLKYSGSTLAAAGVYIAIRGLQTGSWNHTMEAHTRLSESEVYPCACDMAELMRKAPTATLTAVYKKYSSEKFMKIATLPVPHDLRL

SEQ ID NO: 7313 - DNA, 1389 bp, Homo sapiens
  CDS (1)..(1389)
atggagaccggctttcccgcaatcatgtaccctggatcttttattgggggctggggagaagagtatctcagctgggaaggaccggggctcccagatttcgtcttccagcagcagcccgtggagtcttccagcagcaaccccaagagtggagttgtgctggctacagtggcccgaggtcccgatgcttgtcagatactcaccagagccccgctgggccaggatcccccgcagaggacagtgctagggctgctaactgcaaatgggcagtacaggaggacctgtggccaggggatcacaagaatcaggtgttattctggatcagaaaatgccttccctccagctggaaagaaagcactccctgactgtggggtccaagagccccccaagcaagggtttgacatctacatggatgaactagagcagggggacagagacagctgctcggtcagagaggggatggcatttgaggatgtgtatgaagtagacaccggcacactcaagtcagacctgcacttcctgctggatttcaacacagtttcccctatgctggtagattcatctctcctctcccagtctgaagatatatccagtcttggcacagatgtgataaatgtgactgaatatgctgaagaaatttatcagtaccttagggaagctgaaataaggcacagacccaaagcacactacatgaagaagcagccagacatcacggaaggcatgcgcacgattctggtggactggctggtggaggttggggaagaatataaacttcgagcagagaccctgtatctggctgtcaacttcctggacaggttcctttcatgtatgtctgttctgagagggaaactgcagctcgtaggaacagcagctatgcttttggcttcgaaatatgaagagatatatcctcctgaagtagacgagtttgtctatatcaccgatgatacatacacaaaacgacaactgttaaaaatggaacacttgcttctgaaagttctagcttttgatctgacagtaccaaccaccaaccagtttctccttcagtacttgaggcgacaaggagtgtgcgtcaggactgagaacctggctaagtacgtagcagagctgagtctacttgaagcagatccattcttgaaatatcttccttcactgatagctgcagcagctttttgcctggcaaactatactgtgaacaagcacttttggccagaaacccttgctgcatttacagggtattcattaagtgaaattgtgccttgcctgagtgagcttcataaagcgtaccttgatataccccatcgacctcagcaagcaattagggagaagtacaaggcttcaaagtacctgtgtgtgtccctcatggagccacctgcagttcttcttctacaataa

SEQ ID NO: 7314 - protein, 462 aa, Homo sapiens [sequence omitted]

SEQ ID NO: 7315 - DNA, 1197 bp, Homo sapiens
  CDS (1)..(1197)
atggcgctgctccgacgcccgacggtgtccagtgatttggagaatattgacacaggagttaattctaaagttaagagtcatgtgactattaggcgaactgttttagaagaaattggaaatagagttacaaccagagcagcacaagtagctaagaaagctcagaacaccaaagttccagttcaacccaccaaaacaacaaatgtcaacaaacaactgaaacctactgcttctgtcaaaccagtacagatggaaaagttggctccaaagggtccttctcccacacctgaggatgtctccatgaaggaagagaatctctgccaagctttttctgatgccttgctctgcaaaatcgaggacattgataacgaagattgggagaaccctcagctctgcagtgactacgttaaggatatctatcagtatctcaggcagctggaggttttgcagttcataaacccacatttcttagatggaagagatataaatggacgcatgcgtgccatcctagtggattggctggtacaagtccactccaagtttaggcttctgcaggagactctgtacatgtgcgttggcattatggatcgatttttacaggttcagccagtttcccggaagaagcttcaattagttgggattactgctctgctcttggcttccaagtatgaggagatgttttctccaaatattgaagactttgtttacatcacagacaatgcttataccagttcccaaatccgagaaatggaaactctaattttgaaagaattgaaatttgagttgggtcgacccttgccactacacttcttaaggctagcatcaaaagccggggaggttgatgttgaacagcacactttagccaagtatttgatggagctgactctcatcgactatgatatggtgcattatcatccttctaaggtagcagcagctgcttcctgcttgtctcagaaggttctaggacaaggaaaatggaacttaaagcagcagtattacacaggatacacagagaatgaagtattggaagtcatgcagcacatggccaagaatgtggtgaaagtaaatgaaaacctaactaaattcatcgccatcaagaataagtatgcaagcagcaaactcctgaagatcagcatgatccctcagctgaactcaaaagccgtcaaagaccttgcctccccactgataggaaggtcctag

SEQ ID NO: 7316 - protein, 398 aa, Homo sapiens [sequence omitted]

SEQ ID NO: 7317 - DNA, 1422 bp, Nicotiana tabacum
  CDS (1)..(1422)
atggcttcaagaatcgttcttcaacagcagaatagaggtgaggcagtccctggggcagtaaagcagaaaaggaatatggcaccagaagggagaaataggaaagcgcttggcgatattgggaatgtggctacaggtcgtggggtcgaaggaaaaaaaccacttcctcagaaacctgtggctgttaaggtgaaaggagcaattgttgctaaagtacctccagtaagaaaaccagctcagaagaaagccacagttaagccaaaccccgaggatattattgaaattagtcctgacacacaagaaaaactgaaggagaacatgcaaaggacgaaggctgataaagactcattaaaacagaaagcaactcttacttctactctcactgctcgaagcaaggctgcatgtggtctgagtaaaaaaccaaaggagcagatagtggacattgatgcagcagatgtgaacaatgagttggcagttgtggaatatgttgaagacgtttacagcttctacaaacttgctgagaatgagacaagagttcatgactacatggactcacagcctgagataaatgatagaatgagagcagttctgattgattggttggttgaagtccaccaaaaatttgaacttaatccagagactctttacctcacaatcaacattgtggatcgctaccttgcggtgaagactacatcaagaagggaattgcagttagtgggcatcagtgccatgctcatagcctccaaatatgaagaaatttgggctcctgaggtcaatgactttgtatgcatctcaaataagagttacactcgtgatcaggtgttagctatggagaaagaatttcttgggcaattggaatggtacttaacagtcccaacaccttacgtattcctcgcacgtttcattaaagcttctccacctgattcagaaattaagaacatggtatattttctggctgagctgggattgatgaattatgcaacaattatctactgcccctcaatgattgctgcatcagcagtctatgctgctcgacacaccatcaataggacaccattttggaatgagacacttaagctgcacactggtttctcagaatctcagctaatcgagtgtgcaaggttgttagtgagctatcactctgcagctgcaactcacaagctaaaggtgatatacaagaagtactccagtccggagagaggtgtcgtttcattactaactccagccaaatccctgttggctgcatcatcatcaagtgtgtcatcggggcgaagcgatctagccaagagcacaaaagcagcagcaacatcatcatcccctatggtggtagtaggttgtcaaaggtgccacatgtatgtcatggtaactgaagctgatccaagatgcccccaatgcaagagcactactactaggaagatgacttaa

SEQ ID NO: 7318 - protein, 473 aa, Nicotiana tabacum
MASRIVLQQQNRGEAVPGAVKQKRNMAPEGRNRKALGDIGNVATGRGVEGKKPLPQKPVAVKVKGAIVAKVPPVRKPAQKKATVKPNPEDIIEISPDTQEKLKENMQRTKADKDSLKQKATLTSTLTARSKAACGLSKKPKEQIVDIDAADVNNELAVVEYVEDVYSFYKLAENETRVHDYMDSQPEINDRMRAVLIDWLVEVHQKFELNPETLYLTINIVDRYLAVKTTSRRELQLVGISAMLIASKYEEIWAPEVNDFVCISNKSYTRDQVLAMEKEFLGQLEWYLTVPTPYVFLARFIKASPPDSEIKNMVYFLAELGLMNYATIIYCPSMIAASAVYAARHTINRTPFWNETLKLHTGFSESQLIECARLLVSYHSAAATHKLKVIYKKYSSPERGVVSLLTPAKSLLAASSSSVSSGRSDLAKSTKAAATSSSPMVVVGCQRCHMYVMVTEADPRCPQCKSTTTRKMT

SEQ ID NO: 7319 - DNA, 1206 bp, Penaeus japonicus
  CDS (1)..(1206)
atgtctttaagaactacctcgcatcttagcagtaatgtgggacatgacctgaacaacccacgcaaagtagaggcaaagatgatccaggggccagtcgcccgtcgtgccttgggggatgttggcaaccatggtattcccgtgcaagggcccaaagctcctctcaaggcgggggagatctctcgcaatgagcccgtcaagctgcacaagcccaagtccggcctctctgggctgctcgccagacccggcaaagaaaatgtgaagcccctgaaggaagtggcagaacgtgtggagcaaatggatgtggaggaggaagccaaggtggaagagctggctattgccttctctacccagagactagatattgaagatattgatgctcaagacagtgataatcctcagcttgtatctgaatacgtgaatgatatctacaagtacctgcgagaacttgaggatgccaacaagatcatgcccagatacctagaaggccaagttattacaggaaagatgagagcaattttgattgattggcttgtccaggtccaccttcgcttcaccctactacaagagacgctgtatctgactgttgctatcattgacagatttctccagactcagaggaatataccacgtaacaagctacagttggttggtgcgactgccatgttcattgttagcaagtatgaggaaatgtactgcccagaaattggggactttgcatacatcacagacaaagcctactccaaggcagaaattcgtaagatggaggtgaccatgctgaaagagctgggcttcaacgtatcctatcccctccccctacacttcctgcgaagaaacagcaaggctggttcagttgatgcttctcaacataccctggcaaagtacctaatggaactttgcttgccagagtacggcatgtgccattacaaatcgtcgatgattgctgcatctgctctctgcctttctctaaaattgttggatggcagtagctggagcaacacattgacttactattctcgctacacggaagaacagatcatgcccgtcatttgcaagatggcagctgttgtagtaaagagcagtagtgccaagcaacaggctgtaagacagaagtacaaggccagtaagctgatgaaaattagtgagattccccagctcaagtcgaagctcatcaacacgcttgcagagaagagtgcgtcgtatgcataa

SEQ ID NO: 7320 - protein, 401 aa, Penaeus japonicus
MSLRTTSHLSSNVGHDLNNPRKVEAKMIQGPVARRALGDVGNHGIPVQGPKAPLKAGEISRNEPVKLHKPKSGLSGLLARPGKENVKPLKEVAERVEQMDVEEEAKVEELAIAFSTQRLDIEDIDAQDSDNPQLVSEYVNDIYKYLRELEDANKIMPRYLEGQVITGKMRAILIDWLVQVHLRFTLLQETLYLTVAIIDRFLQTQRNIPRNKLQLVGATAMFIVSKYEEMYCPEIGDFAYITDKAYSKAEIRKMEVTMLKELGFNVSYPLPLHFLRRNSKAGSVDASQHTLAKYLMELCLPEYGMCHYKSSMIAASALCLSLKLLDGSSWSNTLTYYSRYTEEQIMPVICKMAAVVVKSSSAKQQAVRQKYKASKLMKISEIPQLKSKLINTLAEKSASYA

SEQ ID NO: 7321 - DNA, 1260 bp, Oryza sativa
  CDS (1)..(1260)
atggagaacatgagatctgagaactttaaccaaggtgtttcaatggagggcgtcaagcatgcgcccgagatggcaaacaccaacaggagggctctgcgggacatcaagaacatcatcggagcacctcaccagcacatggctgtgagcaagaggggtttgctagataaacctgccgctaagaaccaagctggacaccgtcctatgacgaggaaatttgctgcaacactggcaaaccaaccctccagtgctcccctggcacccattggaagtgagaggcaaaaaaggacagcagattctgcatttcatggtccagcagatatggagtgcaccaagatcacatctgatgatttgccattgccaatgatgtctgagatggacgaagtgatgggttctgaactgaaagaaattgagatggaagacattgaggaggcagcacctgatattgacagctgtgatgcaaataactcccttgcagtagttgaatatgttgatgaaatttacagcttctacaggaggagtgagggtttgagctgtgtctctcctaattacatgttgagccaaaatgacataaatgagaagatgcgcggcattctcatcgattggctgatagaggtgcattacaagttagagctattggatgagaccctcttccttactgtgaatatcatagaccgattcttggctcgcgaaaatgtggtgcgaaagaagcttcagttggttggcgtgactgccatgctgctcgcctgcaagtatgaagaagtgagcgttcctgtagtggaggatcttatcctaatctgcgaccgcgcctacacaagaacagatattctcgaaatggagaggatgattgtaaacactcttcagtttgatatgtcagttccaactccatactgtttcatgagaaggttcctcaaggctgcacaatctgacaagaagcttgagctcatgtctttcttcataattgagctgagccttgtcgagtatgagatgctcaaattccagccgtcaatgctggcggctgctgccatctacactgctcagtgcaccattaatgggttcaagtcctggaacaaatgctgtgagctgcatacaaaatactctgaagaacagctgatggagtgctccaagatgatggttgagctccaccaaaaagcaggacatgggaagcttactggagttcatagaaagtacagcacatttaggtatggttgcgccgcaaaatcggagcccgccgtcttcttgctcaagagcgtggcactgtaa

SEQ ID NO: 7322 - protein, 419 aa, Oryza sativa
MENMRSENFNQGVSMEGVKHAPEMANTNRRALRDIKNIIGAPHQHMAVSKRGLLDKPAAKNQAGHRPMTRKFAATLANQPSSAPLAPIGSERQKRTADSAFHGPADMECTKITSDDLPLPMMSEMDEVMGSELKEIEMEDIEEAAPDIDSCDANNSLAVVEYVDEIYSFYRRSEGLSCVSPNYMLSQNDINEKMRGILIDWLIEVHYKLELLDETLFLTVNIIDRFLARENVVRKKLQLVGVTAMLLACKYEEVSVPVVEDLILICDRAYTRTDILEMERMIVNTLQFDMSVPTPYCFMRRFLKAAQSDKKLELMSFFIIELSLVEYEMLKFQPSMLAAAAIYTAQCTINGFKSWNKCCELHTKYSEEQLMECSKMMVELHQKAGHGKLTGVHRKYSTFRYGCAAKSEPAVFLLKSVAL

SEQ ID NO: 7323 - DNA, 1173 bp, Xenopus tropicalis
  CDS (1)..(1173)
atggctactcgtcgggctgccgtttcccgtgaagcagataatattcttgggggtgcaatgaggtccaaagctcaaattaataccagaagagctgctttgggggagattggcaacaaggtgacagtgcgaggaaaaccaccttcagtcaagccttccattgttgtggcaaaaccatcaaaggcagcaactaaaggggcaaatgttaagccgaagcctgtacctgtaaaaacagcagtagctgaagctcccccaaaagtgccctcccctctgccaatggatgtgtctatgaaagaggaagagctgtgccaggccttctcaaatgccttaaccaatgttgaagacattgatgctgatgatggtggaaaccctcagttgtgcagtggctatgtgatggacatctataactacctaaagcaactagaagtccaacaatctgtgcgcccatgctatcttgaaggaaaagaaattaatgagcgtatgagagctatcctagttgactggattgttcaggtgcattctaggtttcagcttcttcaggagactttatacatggggattgcaatcatggatcgctttttacaagttcagccagtctcccgcagtaagcttcagttagttggtgtaacttcactactcgttgcttccaaatatgaagagatgtacaccccagaggttgccgactttgtttatatcactgataatgcctatactgcatctcagatcagagaaatggaaatgatcattcttagggtcctcaactttgaccttggaaggccgttacctcttcacttcctaagacgggcttcaaaatcttgcagtgctgatgcagagcagcatacccttgcaaaatatctgatggagcttacactcatagactatgaaatggtccacttcaacccttcagaaatcgcagcagctgcactctgcctgtcgcaaaaaattcttgctcagggaagctggggtgctacacagcactattacacaggctacacagaaagtgacttgcaactggtcatgaagcatatggctaagaacctgaccaaagtcaaccagaatttaacaaagcatgtggctgtgaggaacaagtatgctagcagtaagctaatgaagatcagcacactgcctcagctgatggctcctctgatcacagaactatctgcaagcctttcttag

SEQ ID NO: 7324 - protein, 390 aa, Xenopus tropicalis
MATRRAAVSREADNILGGAMRSKAQINTRRAALGEIGNKVTVRGKPPSVKPSIVVAKPSKAATKGANVKPKPVPVKTAVAEAPPKVPSPLPMDVSMKEEELCQAFSNALTNVEDIDADDGGNPQLCSGYVMDIYNYLKQLEVQQSVRPCYLEGKEINERMRAILVDWIVQVHSRFQLLQETLYMGIAIMDRFLQVQPVSRSKLQLVGVTSLLVASKYEEMYTPEVADFVYITDNAYTASQIREMEMIILRVLNFDLGRPLPLHFLRRASKSCSADAEQHTLAKYLMELTLIDYEMVHFNPSEIAAAALCLSQKILAQGSWGATQHYYTGYTESDLQLVMKHMAKNLTKVNQNLTKHVAVRNKYASSKLMKISTLPQLMAPLITELSASLS

SEQ ID NO: 7325 - DNA, 1257 bp, Xenopus laevis
  CDS (1)..(1257)
atgcggcgcagtatggcttccaatgggcacatccttacagcatcctctgtggtgggagccagcagtgcattccagaatccatgcctagccaaggtagaagtccagcctaacctgcctcaaagaactgtgttgggtgttatcggtgacaatgaacagcgcagaagatcagttagtcggggtggtgtccctgcaaagagtctacctggaattgaaaatgttcttgctttccctggaaaaatcctgtatgcaaacccagcgcctgttgctccaaagccaagttttacagtctatgtggatgagccaacagaaacctattcagttgaagtagattgtcccagtttggatgatgaggattcaaatattgtcaagcagaacattcacctgctcctagatatcagtgaagcttctccgatggtggttgacacgtcaccccagacaagcccagaggatgactctgtaacagaccctgatgctgtagctgtgtctgaatatatacatgaaattcaccagtaccttcgagaggctgagttgaaacacagaccaaaggcatattacatgcgtaagcagccagacattacttcagcaatgcgcacgatacttgtggactggctagtagaagttggtgaggaatacaagctgcacacggagactctttatctggctatgaattatttggaccgcttcctatcatgcatgtctgtactccggggaaaactgcagcttgtaggcacagcagctattttattggcatcaaaatatgaagaaatctaccctcctgatgttgatgaatttgtgtacataactgatgatacatactcaaagaaacagcttctgcgcatggaacacgttctgttgaaggttctggcctttgaccttactgtacctacagtcaaccaattcttgctacagtatctgcagagacatgcagtcagtgtgaagacggagcaccttgcaatgtacatggcagaactaactctgcttgaagtggagccattcttgaagtacgttccttcacttacagctgctgcagcctattgtcttgccaattatgcactcaacaaagtgttctggcctgaaacactggaagcctttactggctacgcactgagtgacatagcaccttgccttagtgatttgcaccaattctgtcttggtgccccttatcaggctcagcaagcaataagggagaagtacaagaccaccaagtatatgcaagtgtctcttctggagatgccgtcaatacttcccctcaactga

SEQ ID NO: 7326 - protein, 418 aa, Xenopus laevis
MRRSMASNGHILTASSVVGASSAFQNPCLAKVEVQPNLPQRTVLGVIGDNEQRRRSVSRGGVPAKSLPGIENVLAFPGKILYANPAPVAPKPSFTVYVDEPTETYSVEVDCPSLDDEDSNIVKQNIHLLLDISEASPMVVDTSPQTSPEDDSVTDPDAVAVSEYIHEIHQYLREAELKHRPKAYYMRKQPDITSAMRTILVDWLVEVGEEYKLHTETLYLAMNYLDRFLSCMSVLRGKLQLVGTAAILLASKYEEIYPPDVDEFVYITDDTYSKKQLLRMEHVLLKVLAFDLTVPTVNQFLLQYLQRHAVSVKTEHLAMYMAELTLLEVEPFLKYVPSLTAAAAYCLANYALNKVFWPETLEAFTGYALSDIAPCLSDLHQFCLGAPYQAQQAIREKYKTTKYMQVSLLEMPSILPLN

SEQ ID NO: 7327 - DNA, 1182 bp, Xenopus laevis
  CDS (1)..(1182)
atggctctgattatgacaaggagtatgcggctcaatgcagagaatgtggcacaaggaatggctggaaagaaagctgctgtgtccaagcctgtaccaaagcctagaaatgcactgggtgatattggcaaccaaatcggaaaggcaaaagttccactaaaaaagacaacaaaagctcttcggaaacccactgtacaaaagtctgagaaacttgctgtgctggaagaaaatgttcctaaggaagcgcagaaggcagcaccagattcccctagccccatggagacatcggtgtgtgtaatagaagagatgcaaccagaaccagctttctccagtgccctgattcctgtgacagatgtggatgcagaagattcagacaacccaatgctgtgcagtgattatgtgaaggacatctactgttatcttagaaacttggaggctgaacaagcaatcgggccacactatctagatgggcaagagatcaatggaaacatgagggccatactggtagactggcttgtgcaggttcaactgaggtttaaactgctgcaggagacaatgtctatgactgtatctattctggatcgttttctgcaggaaaaccctgtacccaagaagctgttgcagctggccggtgtgagcgccatgtttattgcatgcaagtatgaagagatctattgtccatcaattggtgactttgtctttgtcacagacaacacttacacaaagtcccaaatcagaaacatggagatgcaaatccttagagttctcaattttgacattggaagaccactgccgctgcatttcttgagaagagcatctaaaattggagaggttgactctgtacatcacacactggctaaatacctaatcgagctggttatgacagactatgacatggtgcacatacctccatcacagttggcggcagcagctttctgtctggcaatgaaaattcttaatagtggagaatggactcctactcttgagcactacatggcatacaaagaaagttcccttacaccagtcatgcagcacatcgcaaagaatattgtaaaagtcaatggaggacatacaaagttcatgtctgtcaaaaacaaatacaccagcagtcgacagatgaagatcagctgtctgccacatctaaagtctgagcttgtggaaaacctggcaaaagctgcatcatag

SEQ ID NO: 7328 - protein, 393 aa, Xenopus laevis
MALIMTRSMRLNAENVAQGMAGKKAAVSKPVPKPRNALGDIGNQIGKAKVPLKKTTKALRKPTVQKSEKLAVLEENVPKEAQKAAPDSPSPMETSVCVIEEMQPEPAFSSALIPVTDVDAEDSDNPMLCSDYVKDIYCYLRNLEAEQAIGPHYLDGQEINGNMRAILVDWLVQVQLRFKLLQETMSMTVSILDRFLQENPVPKKLLQLAGVSAMFIACKYEEIYCPSIGDFVFVTDNTYTKSQIRNMEMQILRVLNFDIGRPLPLHFLRRASKIGEVDSVHHTLAKYLIELVMTDYDMVHIPPSQLAAAAFCLAMKILNSGEWTPTLEHYMAYKESSLTPVMQHIAKNIVKVNGGHTKFMSVKNKYTSSRQMKISCLPHLKSELVENLAKAAS

SEQ ID NO: 7329 - DNA, 1179 bp, Xenopus laevis
  CDS (1)..(1179)
atggctactcgtcgggctgcaattccccgtgaagccgataatatccttgggggcgcaatgcggtccaaagttcaaatccatggcaaaagagctgctttgggtgaaattggcaacaaagtgaccgtgcgaggaaaaccacatgcagtcaagcagccttccaatgttgtggcaaagccgtcaaagactgtggcaactaaagttgcaaatgttaagccaaagcctgtacttgtgaaaccaacagtagctgaagctcacaccaaagtgccttcccctgtgccaatggatgtgtctatgaaagaggaagagctgtgccaggcattctctgatgctttgaccagtgttgaagacattgatgcagatgatggtggcaaccctcaattgtgcagtgactatgtgatggacatctataactacctaaagcaactggaagtccaacagtctgtacgccaatgctttctggaaggaaaagagattaatgagcgtatgagggctatcctagttgactggcttgttcaagtgcattctaggtttcagcttcttcaggagactttgtacatgggtgttgccatcatggatcgcttcttgcaagttcagccagtctcccgcagcaagcttcagttggttggtgttacttccctactagttgcttccaaatatgaagagatgtacaccccagaggttgcagactttgtttatatcaccgataatgcctacactgcatctcagatcagagaaatggaaatgattatccttagagtcctcaactttgaccttggacgtccattacctctccacttcctgagacgggcttcaaaatcttgcagtgctgatgcagagcaacatactcttgcaaaatatctgatggagcttacactcgtagactatgaaatggtacacttcaatccttcagaaattgcagctgctgcactctgcttatcccaaaaaattcttggccagggaagctggggtgctactcaacactattacacaggctacacagaaggggacttgcaactggtcatgaagcatatggccaagaacataaccaaagtcaatcagaatctaactaagcatgtggctgtgcgaaacaagtatgcaagcagtaaactgatgaagatcagcacccttcctcagctgatggctcctcttgtcacagaccttgctgcaagtctctcttag

SEQ ID NO: 7330 - protein, 392 aa, Xenopus laevis
MATRRAAIPREADNILGGAMRSKVQIHGKRAALGEIGNKVTVRGKPHAVKQPSNVVAKPSKTVATKVANVKPKPVLVKPTVAEAHTKVPSPVPMDVSMKEEELCQAFSDALTSVEDIDADDGGNPQLCSDYVMDIYNYLKQLEVQQSVRQCFLEGKEINERMRAILVDWLVQVHSRFQLLQETLYMGVAIMDRFLQVQPVSRSKLQLVGVTSLLVASKYEEMYTPEVADFVYITDNAYTASQIREMEMIILRVLNFDLGRPLPLHFLRRASKSCSADAEQHTLAKYLMELTLVDYEMVHFNPSEIAAAALCLSQKILGQGSWGATQHYYTGYTEGDLQLVMKHMAKNITKVNQNLTKHVAVRNKYASSKLMKISTLPQLMAPLVTDLAASLS

SEQ ID NO: 7331 - DNA, 1188 bp, Bufo bufo gargarizans
  CDS (1)..(1188)
atggctacccgccgcgctgctatctcccgtgaagcggacaatgctgttgcaggagcgatgagagctaaagctcagatgaatattaggagagcagctctgggagaaataggaaataaggtgaccgtgcgtggcaagcagcctgtggtcaagaactcaaatgctgtggtgaagccagccagacctgtaactactaaagtggcaaatgccaatgcaaaacctaaggctgtccctgtaaaagggactgtgattgaagctccagctaaggaatcttctccagttcctatggacgtgtcgatgaaggaggaagaggaactttgtcaagctttctctgatgctctgaacagtgtggaagatattgatgctgaagatggtggaaacccacaactatgcagcgagtatgtattggatatctacaactacctgagacagctggagctcgagcagtcaataaagccaagatacctggagggaaaggaagtaaatgaacgaatgagggctattttggttgactggatagtccaagtacactccaggttccaactacttcaggaaacgctgtacatgggtattgccactatggatcggtttcttcaagttcaacctatctctcgtggaaaacttcagttggttggggtaactgcccttcttgtggcttccaaatatgaagagatgtacaccccagaggttgctgactttgtttacatcacagacaatgcttacacagcaagtcagattagagaaatggaagtcttaatgctacgtgagctgaactttgacttggggcgtccactaccacttcacttcctgagacgtgcttcaaagtcctgcagtgctgatgcagagcagtacacactagcaaagtatctaatggagcttaccctcattgactatgacatggtccactttagaccttctgaaatagcatcagctgcactctgtctggcacagaaggtccttggtcagggcagctggggagctactcggcatcactacactgggtactctgaggaagacttgtcgcttatcatgaagcacctggctaagaatgttaccaaagtcaacaagaacctgacaaagcatgtggctgtgagatccaagtatgccagcagcaagctaatgaagatcagcaccatcccacaactgatgtctccaataattacagacctagctggaagtcttgcctcctaa

SEQ ID NO: 7332 - protein, 395 aa, Bufo bufo gargarizans
MATRRAAISREADNAVAGAMRAKAQMNIRRAALGEIGNKVTVRGKQPVVKNSNAVVKPARPVTTKVANANAKPKAVPVKGTVIEAPAKESSPVPMDVSMKEEEELCQAFSDALNSVEDIDAEDGGNPQLCSEYVLDIYNYLRQLELEQSIKPRYLEGKEVNERMRAILVDWIVQVHSRFQLLQETLYMGIATMDRFLQVQPISRGKLQLVGVTALLVASKYEEMYTPEVADFVYITDNAYTASQIREMEVLMLRELNFDLGRPLPLHFLRRASKSCSADAEQYTLAKYLMELTLIDYDMVHFRPSEIASAALCLAQKVLGQGSWGATRHHYTGYSEEDLSLIMKHLAKNVTKVNKNLTKHVAVRSKYASSKLMKISTIPQLMSPIITDLAGSLAS

SEQ ID NO: 7333 - DNA, 1620 bp, Ustilago maydis
  CDS (1)..(1620)
atgccacaacgcgctgccctttctgacgtcagtaatcgtgctggcgtcgccagagccaatgcactagcagatggcgccgtcaagctggcgcccggccacaatggcctgcgctctcaacacacaaaaagcatgacccgtctccgcgacgcccgttcgcgatccacgtccgagcagagactctctggcccaacacgctctgtctcggaacaacgtgactgtgcaccagccgctgccgagtctatgcatgtggaggcgtcacaactcctcccacccttccagagctccgcttcagtcaaggtgggcatcagcgacgaagcaggaagcagcaggctgcacgaagacgcagacatccgcgacctcgccggctcgcagcacagtgaccatgtcgaagaggacgagatgtcagatgtcgcctctacttcgagcagcgacgacgataccgcagaggacatcggcgtagacaaggccaactggctcgattcggaacgactcgatgccggtgcaagacccgagagcgtcacctctgccgaggacggcgacatgctcgacttcaacattgatccagagggtttggtctcgttacatccggagctggaggaggccgcgcgacgcaaggtggccttgatcaagtctcgctaccaggaggaagtcattcagcctcgtgcggcgcgcgcgcaagcacaacatgcagaagcagtcgccgccggtcagctctcggctgagctggctgcgcacgaagacgagctgatcgtcatggggctcgatcccgaggaggtacgcgacacgagtatggtggccgagtactcgaatgagatctttagctacatggctcggtgcgagcgcgagaccatggccaacccgaattacatggagtttcagagcgagattcactggcacatgcgtgctacgctcgtcgactggctcttgcaggtgcacatgcgctaccacatgctgccagagacgttgtggattgccatcaatgtggtcgaccgcttcctgagcgtgcgcgtggtcagcctggccaagctgcagctcgtcggtgtcacggccatgtttattgcagcaaagtacgaagagatcctggcgcctagcgtcaaggagtttgtctacatgaccgagggtggctactcgcaagaggagatcctcaagggcgagcgcatcatcctctcgacgttgggctttaacatttcgtcctactgctcaccttactcttgggtgcgaaagatctccaaggcggacgactacgacattcgcacccgtaccctgtccaagttcctgatggagctggcgctgctggatcatcgcttcctgcgtgctcggcccagtcttgtggccgctgtgggcatgtttttggccaaaaagatgctgggaggcgagtgggatgacgcctttgtctactactctgactttaccgaagagcagctggtccccggcgcgaatctattactcgagcgtttgctggaccaaggctttgaggagcagtttgtctaccgcaagtactcgaacaaaaagtttctccgggccagcgtctttgcgcgtgattgggccttccagaaccacagcgcactactcgccgctgctgcagcagcggcagggtcgactcaagcaggtcagccttga

SEQ ID NO: 7334 - protein, 539 aa, Ustilago maydis
MPQRAALSDVSNRAGVARANALADGAVKLAPGHNGLRSQHTKSMTRLRDARSRSTSEQRLSGPTRSVSEQRDCAPAAAESMHVEASQLLPPFQSSASVKVGISDEAGSSRLHEDADIRDLAGSQHSDHVEEDEMSDVASTSSSDDDTAEDIGVDKANWLDSERLDAGARPESVTSAEDGDMLDFNIDPEGLVSLHPELEEAARRKVALIKSRYQEEVIQPRAARAQAQHAEAVAAGQLSAELAAHEDELIVMGLDPEEVRDTSMVAEYSNEIFSYMARCERETMANPNYMEFQSEIHWHMRATLVDWLLQVHMRYHMLPETLWIAINVVDRFLSVRVVSLAKLQLVGVTAMFIAAKYEEILAPSVKEFVYMTEGGYSQEEILKGERIILSTLGFNISSYCSPYSWVRKISKADDYDIRTRTLSKFLMELALLDHRFLRARPSLVAAVGMFLAKKMLGGEWDDAFVYYSDFTEEQLVPGANLLLERLLDQGFEEQFVYRKYSNKKFLRASVFARDWAFQNHSALLAAAAAAAGSTQAGQP

SEQ ID NO: 7335 - DNA, 2124 bp, Ustilago maydis
  CDS (1)..(2124)
atgtctcagaacatcgtaagtgctctacatcctcctctggactcttccacttggtcgccataccaaacctttctaaccgtcaccttgactttgctccaccatctcacctctaggcatcccgtcgcatcccgttgcggacgcgcagcaccgcctctgctagcggtgcacaagcaaaggagaatgctggcgttaccagtgtctcctccagggcgctcgctaccgccacgatggtgctgctgccgacgctggtccttccaagccagcctcgaccgcgactgcgccaccaaggcgtcggttgcttcagccgcttcaggcgttctcggaactcggaagagagccgcgcttggcgatctcacaaacgccaaccgcacccgatccgccatggctggcaacgatgacaagggcaaagctgctttgaaggatgccatcaagccccgcgccaccacctcggcttctacatcatcgcgatcagccgtcggcactgcggcctctgccaccaccaccggcaccggcgctgctcgtcgcgtcgttcgcactcgacccaccaccgcctccagcaccaccgcttctactactgtcacagatgccgccagcgaccgccccttccgtgcttctagacgcgtcgccggcaccactgcttccacagcatcaggtatcccatcagcaacctctagaccaacatccaccactactgctacatcagctgtcactgctgctcgcaaggcttcaatggtccgtgcgtcctcggccggctcgcagactgatgttcgccgcgatgtctccaatacctccgctgtcaccaccaacacgacagctcccatcaccgctgcgtcgcggtcgtccaaggtacagctcaatgaggttcacgacacggatgacaagatggaggcacctcaggccaagcgtctcaaaactgaacagaccaacaagcctgccaaagatgagggatgggaggacctcgacgccgaagatgctgacgacccgttgatggttgctgaatacgtcaacgacatctttgagtacatgaaggagctcgaaatcatcaacatgcccaacggagactacatggccaaccagaaggagatcaattgggacgtgcgtgccatcctcatcgactggctcgtcgatgtccacgccaaattccgcctgctccccgagacgctctatctcgccgtcaacatcatcgaccgcttcctctctcgacgaaccatctcgctatccaagctccagcttgttggtgtcactgccatgtgcatcgcctccaagtacgaagaggtcatgtgcccctcgattcagaacttctgccacctcgctgacggcggctacacagatgtcgagatcctccgcgccgaacgatacatgctcaaggtgctcgactttagcatgtcgtacgccaaccccatgaacttcctccgtcgcatcagcaaggccgacaactacgacatccagacgcgtaccgttgccaagtactttatggagatttcgctgctcgactaccgtcttatggagcatccaccatctctcatcgctgctgcctctgtctggctcgctcgcgaggtgcttgaacgtggtgagtggacgcccacgctggtgcactactctacctactcggagcaggagctgctgggtaccgctgagatcatgctcgactactgcttgcgacccatcgcccaccaattcttccacaagaagtacgcgcacaagaagttcatgcgcgcttcaacttatgtcattgaatgggcgcacaaggccttccccgaaggcgttgtcggcgttgacgagcagcaggacctcaacgtgcttcgcatcgacctctacgagcgcaacgagatcgaacgaccggaaatgtcgcccgtctcttcgtcgcgcgccacatcgccggtcagcatgcatgggcaggctcactttgaggtcgagccaagtcagaacgtcgatggcgacgacacggtctcgtacgcgcatgatgacgatcacgaggaagaagacgacctcgtggacgacgcacaagagatcgaaggcgacgtgcagctgctcgacgatgtcaaggctgctgcccagcgtcaagatacccgacaggtgctgcgtgatgtgaccaacgcgtacgaagcgacggagaccttctag

SEQ ID NO: 7336 - protein, 707 aa, Ustilago maydis
MSQNIVSALHPPLDSSTWSPYQTFLTVTLTLLHHLTSRHPVASRCGRAAPPLLAVHKQRRMLALPVSPPGRSLPPRWCCCRRWSFQASLDRDCATKASVASAASGVLGTRKRAALGDLTNANRTRSAMAGNDDKGKAALKDAIKPRATTSASTSSRSAVGTAASATTTGTGAARRVVRTRPTTASSTTASTTVTDAASDRPFRASRRVAGTTASTASGIPSATSRPTSTTTATSAVTAARKASMVRASSAGSQTDVRRDVSNTSAVTTNTTAPITAASRSSKVQLNEVHDTDDKMEAPQAKRLKTEQTNKPAKDEGWEDLDAEDADDPLMVAEYVNDIFEYMKELEIINMPNGDYMANQKEINWDVRAILIDWLVDVHAKFRLLPETLYLAVNIIDRFLSRRTISLSKLQLVGVTAMCIASKYEEVMCPSIQNFCHLADGGYTDVEILRAERYMLKVLDFSMSYANPMNFLRRISKADNYDIQTRTVAKYFMEISLLDYRLMEHPPSLIAAASVWLAREVLERGEWTPTLVHYSTYSEQELLGTAEIMLDYCLRPIAHQFFHKKYAHKKFMRASTYVIEWAHKAFPEGVVGVDEQQDLNVLRIDLYERNEIERPEMSPVSSSRATSPVSMHGQAHFEVEPSQNVDGDDTVSYAHDDDHEEEDDLVDDAQEIEGDVQLLDDVKAAAQRQDTRQVLRDVTNAYEATETF

SEQ ID NO: 7337 - DNA, 1197 bp, Homo sapiens
  CDS (1)..(1197)
atggcgctgctccgacgcccgacggtgtccagtgatttggagaatattgacacaggagttaattctaaagttaagagtcatgtgactattaggcgaactgttttagaagaaattggaaatagagttacaaccagagcagcacaagtagctaagaaagctcagaacaccaaagttccagttcaacccaccaaaacaacaaatgtcaacaaacaactgaaacctactgcttctgtcaaaccagtacagatggaaaagttggctccaaagggtccttctcccacacctgaggatgtctccatgaaggaagagaatctctgccaagctttttctgatgccttgctctgcaaaatcgaggacattgataacgaagattgggagaaccctcagctctgcagtgactacgttaaggatatctatcagtatctcaggcagctggaggttttgcagtccataaacccacatttcttagatggaagagatataaatggacgcatgcgtgccatcctagtggattggctggtacaagtccactccaagtttaggcttctgcaggagactctgtacatgtgcgttggcattatggatcgatttttacaggttcagccagttttccggaagaagcttcaattagttgggattactgctctgctctgggcttccaagtatgagaaaatgttttctccaaatattgaagactttgtttacatcacagacaatgcttatcccagttcccaaatccgagaaatggaaactctaattttgaaagaattgaaatttgagttgggtcgacccttgccactacacttcttaaggcgagcatcaaaagccggggaggttgatgttgaacagcacactttagccaagtatttgatggagctgactctcatcgactatgatatggtgcattatcatccttctaaggtagcagcagctgcttcctgcttgtctcagaaggttctaggacaaggaaaatggaacttaaagcagcagtattacacaggatacacagagaatgaagtattggaagtcatgcagcacatggccaagaatgtggtgaaagtaaatgaaaacttaactaaattcatcgccatcaagaataagtatgcaagcagcaaactcctgaagatcagcatgatccctcagctgaactcaaaagccgtcaaagaccttgcctccccactgataggaaggtcctag

SEQ ID NO: 7338 - protein, 398 aa, Homo sapiens [sequence omitted]

SEQ ID NO: 7339 - DNA, 1194 bp, Brachydanio rerio
  CDS (1)..(1194)
atggctctccgtgtcacaaggaacactcgcctggccagcagcgagaatcagaacgctctgcccggaaaagcagttgtagcgaacaagcccggactcagaccaagggccgcgctgggggagattggcaacaatccgcaaacacgacaggctttgaagaagaaggaggtgaaggttgcacccgccgccgaggttgtggttgagaaggcacctgtggttcaacagcccaagaaggattctcctaaggttcaacatggcgttaaggttgtgtctgagccttcctctcctgttcctatggagacctccggctgtgcttcagatgatctgtgtcaagcattctctgatgttctgcttaatatcaaggatgttgacgcagatgattatgataatcccatgctttgcagtgaatatgtcaaggacatctatttgtatttgcgccagcttgagactgaacaagctgtaaggccaaaatatctggcaggaaaggaagttactgggaacatgcgtgccattcttatcgactggcttgtgcaagtccagattaagtttaggctgcttcaggaaaccatgtacatgactgttgccatcatcgatcgcttccttcaggatcatccagttccaaagaagcagctgcaacttgttggtgtaacggccatgttcatcgcctcaaaatatgaagaaatgtacccaccagagattgcagactttgcttttgtgacagaccgtgcatacaccaccagtcagatccgggagatggagatgaaggtcctgagagtcctcaactttggttttggaaggcctctaccactacagtttctcaggagggcctccaagattggagatgtgactgcagaacatcacacattagcaaaatatttcctggagctcaccatggtcgattatgacatggtccactaccctccctctcagatggccagtgctgcttatgccctgaccctgaaggtcttcaactgtggtgactggacccctactcttcagcactacatgggctacactgaagatgagctggttcctgtgatgcagcatattgccaaaaatgttgtgagggtcaacgagggcctttctaagcatctggctgtgaagaataagtactccagtcagaagcagatgagaattgctacaatttctcagctcaagtcctccttgatcaaagacctggctaagcagatctcatag

SEQ ID NO: 7340 - protein, 397 aa, Brachydanio rerio
MALRVTRNTRLASSENQNALPGKAVVANKPGLRPRAALGEIGNNPQTRQALKKKEVKVAPAAEVVVEKAPVVQQPKKDSPKVQHGVKVVSEPSSPVPMETSGCASDDLCQAFSDVLLNIKDVDADDYDNPMLCSEYVKDIYLYLRQLETEQAVRPKYLAGKEVTGNMRAILIDWLVQVQIKFRLLQETMYMTVAIIDRFLQDHPVPKKQLQLVGVTAMFIASKYEEMYPPEIADFAFVTDRAYTTSQIREMEMKVLRVLNFGFGRPLPLQFLRRASKIGDVTAEHHTLAKYFLELTMVDYDMVHYPPSQMASAAYALTLKVFNCGDWTPTLQHYMGYTEDELVPVMQHIAKNVVRVNEGLSKHLAVKNKYSSQKQMRIATISQLKSSLIKDLAKQIS

SEQ ID NO: 7341 - DNA, 1194 bp, Xenopus laevis
  CDS (1)..(1194)
atgtcgctgcgtatcaccagaaacatgatggcaaatacagaaaacaatgtgaaaaccactttggctggaaagagggttgttgccaccaaaccaggcttgagacctcgtacagcattgggagacattggaaacaaggcagagctgaaagtgccagcaaaaaaggaattaaagccagcagtaaaggctgtcaagaagacaaaacccattgacaaagttttggagcctctgaaagtcagtgaagagaatgtttgccctaaacctactccggttgaacccagctcaccaagcccaatggaaacatctggttgcctccctgatgagctttgccaggccttctctgatgtcctgattcaagttaaagatgttgatgctgatgatgatggcaacccaatgctgtgcagtgaatatgtcaaagacatttatggctacctgagaagtcttgaggatgcacaagcagtcagaccaaattacctacatggacgggaagttacaggcaacatgcgtgctattttgatcgactggctggtccaggtgcaaatgaagttccgtctgctgcaggagaccatgtttatgactgttggcattattgaccgttttctgcaggaacacccagttcccaaaaaccagctgcagcttgtgggggtcaccgcaatgttccttgctgctaaatacgaagagatgtacccaccagaaattggggactttacttttgtaactgatcacacatacacaaaggctcaaattagagacatggaaatgaagatacttcgtgtgctaaagtttgcaattggccgacctctacccctgcacttccttcggagagcatctaagattggagaggtgactgctgagcagcatagtttggccaaatatttgatggaacttgtgatggtggattatgacatggtgcattatgctccttcccaaatagcagcttctgcctcccgcttgtctcttaaaatcttaaatgcaggtgactggaccccaacactgcatcactatatggcttactctgaagaagatctggtccctgttatgcagcatatggccaagaacataatcaaggtgaacaaaggactgactaagcacctgactgttaagaacaaatatgccagcagcaaacaaatgaagatcagcatgattccacaattgaaatcggatgttgttgtggcaatggcccgcccacttgtatga

SEQ ID NO: 7342 - protein, 397 aa, Xenopus laevis
MSLRITRNMMANTENNVKTTLAGKRVVATKPGLRPRTALGDIGNKAELKVPAKKELKPAVKAVKKTKPIDKVLEPLKVSEENVCPKPTPVEPSSPSPMETSGCLPDELCQAFSDVLIQVKDVDADDDGNPMLCSEYVKDIYGYLRSLEDAQAVRPNYLHGREVTGNMRAILIDWLVQVQMKFRLLQETMFMTVGIIDRFLQEHPVPKNQLQLVGVTAMFLAAKYEEMYPPEIGDFTFVTDHTYTKAQIRDMEMKILRVLKFAIGRPLPLHFLRRASKIGEVTAEQHSLAKYLMELVMVDYDMVHYAPSQIAASASRLSLKILNAGDWTPTLHHYMAYSEEDLVPVMQHMAKNIIKVNKGLTKHLTVKNKYASSKQMKISMIPQLKSDVVVAMARPLV

SEQ ID NO: 7343 - DNA, 1248 bp, Lytechinus variegatus
  CDS (1)..(1248)
atgatggctcataccgcaagaaattcaaatatgaatactcttggttttaaaaagctgcagaatcttgacaatgagaacgctggtgcaaggcttggtgcaaagagcatggctgttcaaaaacctgcacagagggctgctctgggtaacatcagtaacacaatgcgaaccacacaggttgctggtaaaaaggttgtgaagaaagatgcaaggacaaaaacgatggtaaaatccaaggctacgtcatcacttcaatctgtagctagtttacctgttcctgtagacaagccagatatctgcaggtcaccgttgccacaagtagttgacaaaatggaggtagattctgttgaatcggcaattgaagcattttctcaacaactgatcgatctgcaagtagaagacatcgacaaagacgacagtgacaaccctcagctgtgtagtgaatatgtcaaagagatctacctgtacatgaggagcttagagaagagaatggccgtgcccgctgcctatctagatagggaaggtcagctgacgggtcgtatgcgtcacatccttgtcgactggttagttcaagttcatctgagatttcatcttctccaagagacactcttcctcacagtacaactcattgacagattcctggttgatcacacggtctcaaaaggaaagcttcagcttgttggtgttacagcgatgttcattgccagcaagtatgaagagatgtaccctcctgaaatcaatgactttgtttacatcactgaccaagcatacaccaagtcacagatcagacagatggagattgtcatgttgaaggggctaggctacaatctaggcaaacctctgtgccttcacttcctcagacgcaactcaaaggcagctatggttgacccacagaagcatactctagcgaagttcctgatggagattactctaccagaatacaacatggtgcaatatgatccatctgagattgctgcagcagccctctacatgtccatgagattattaggttcagaagaagacggctggggagctaagatgacacattacagtatgtacaatgaagatcacatcagacccatcgttagaaagatggcacaggctgttatcaggaatgatgccatgacagaaaagtatcatgctgtaaagacaaaataccgcagcagtcgattcatgaacatcagtactctcccagagctggaatccgatcttatcaaatcattagcagaagacggtgaagaacgtatgtga

SEQ ID NO: 7344 - protein, 415 aa, Lytechinus variegatus
MMAHTARNSNMNTLGFKKLQNLDNENAGARLGAKSMAVQKPAQRAALGNISNTMRTTQVAGKKVVKKDARTKTMVKSKATSSLQSVASLPVPVDKPDICRSPLPQVVDKMEVDSVESAIEAFSQQLIDLQVEDIDKDDSDNPQLCSEYVKEIYLYMRSLEKRMAVPAAYLDREGQLTGRMRHILVDWLVQVHLRFHLLQETLFLTVQLIDRFLVDHTVSKGKLQLVGVTAMFIASKYEEMYPPEINDFVYITDQAYTKSQIRQMEIVMLKGLGYNLGKPLCLHFLRRNSKAAMVDPQKHTLAKFLMEITLPEYNMVQYDPSEIAAAALYMSMRLLGSEEDGWGAKMTHYSMYNEDHIRPIVRKMAQAVIRNDAMTEKYHAVKTKYRSSRFMNISTLPELESDLIKSLAEDGEERM

SEQ ID NO: 7345 - DNA, 1566 bp, Mus musculus
  CDS (119)..(1384)
gccccgcccgcccggccccggccggggtgcgcttgctaatcgcccagacagagaagaacctgagaagcagggcctgctgtgggttcccaagcagcagcaggctgtggcttactaggcaatgcatcgccagagctccaagagtggagtcgctctgcctccagtgggccaaggtcctgatgcttgtcaaatgctcagcagagctcagcttggccaggatcccccacagagaaccgtgctaggggtgttgactgaaaatgagcagtacaggaggacctgtggccaggagatcacagcaatcagatgtttttctggatcagaaaatgtcttccctgcggctggaaagaaagtgctctctgaccatggggtcaatgaaccagccaaacgtgggtttgatatctatatggatgatcctgaacagggggacagagatacctgctcggggaaagagggcatcatatttgaggatgtgtatgaagtcgacaccagcatgctcaagtcagatctccacttcctgctggatttcaacacagtttccccaatgctggttgaccccaccacccatgcccagtcagaggaagcaacggattttggttcagatgtgattaacgtaacggagtatgcagaggagattcatcgctaccttcgagaagctgaagtaagacacagacccaaggctcactacatgaggaagcagccggacatcacggagggcatgcgcgccatcctggtggactggctggtggaggttggggaagaatataaacttcgcacagagaccctgtacttggctgtcaacttcctggacaggtttctctcctgcatgtctgttctgagagggaaattgcagcttgtcgggacagcagctattctcctggcttcgaaatatgaagagatatatccgcccgacgtggatgagtttgtctacatcaccgacgatacgtacacaaagcgacagctactgaggatggagcatctgctactcaaagtcctggcatttgatctgaccgttccaaccaccaaccaattcctccttcagtacctaaggcgtcaaggagtgtgcatcaggactgagaatttggccaagtatgttgcagaactgagccttctggaagctgacccattcttgaagtatcttccttccttggttgctgcagcagcttactgcctggcaaactatattgtgaacagacacttctggccagaaacacttgctgcatttacgggctattcattaaatgagattgtgccttgcctgagtgagctgcataaagcatgcctcagtatcccccatcgaccgcagcaagcaatcagggagaagtacaaggcttcgaagtacctgcacgtgtccctcatggagccgcctgtagttcttcccctgcagtgaatggcaaagctcattggccacatcagcaggcttgctctgaggtttctgcgagtggggccaactaacgtcagttgtacataacaccttcaacatgagaatgttaggttctcttagatttcagtagtttataatttatatagatatagacaggtattttaaaagaataaacaacttgctgttcc

SEQ ID NO: 7346 - protein, 421 aa, Mus musculus
MHRQSSKSGVALPPVGQGPDACQMLSRAQLGQDPPQRTVLGVLTENEQYRRTCGQEITAIRCFSGSENVFPAAGKKVLSDHGVNEPAKRGFDIYMDDPEQGDRDTCSGKEGIIFEDVYEVDTSMLKSDLHFLLDFNTVSPMLVDPTTHAQSEEATDFGSDVINVTEYAEEIHRYLREAEVRHRPKAHYMRKQPDITEGMRAILVDWLVEVGEEYKLRTETLYLAVNFLDRFLSCMSVLRGKLQLVGTAAILLASKYEEIYPPDVDEFVYITDDTYTKRQLLRMEHLLLKVLAFDLTVPTTNQFLLQYLRRQGVCIRTENLAKYVAELSLLEADPFLKYLPSLVAAAAYCLANYIVNRHFWPETLAAFTGYSLNEIVPCLSELHKACLSIPHRPQQAIREKYKASKYLHVSLMEPPVVLPLQ

SEQ ID NO: 7347 - DNA, 1152 bp, Marthasterias glacialis
  CDS (1)..(1152)
atgttgaacggcgaaaatgttgactcgaggatcatgggcaaggtggccaccagagcatcctcaaagggagttaagtcaacactgggcacaaggggtgccctggagaacatcagtaacgtagcacgcaataacttgcaagcaggagctaagaaggagctggtaaaagctaaacgtggaatgaccgaatcaaaggctaccagttcactacagtctgtcatggggctcaatgttgaaccaatggaaaaggccaaaccacagtcaccagagcccatggatatgagtgagatcaatagtgcattggaagcattctctcagaacctcttggtaggagtggaagacatcgacaagaatgactttgacaacccacagctctgcagcgagtttgtaaatgacatctatcagtacatgaggaaactggagcgtgaattcaaagtgaggacagactatatgacgatacaggaaatcaccgagagaatgcgtagtatcctcatcgactggctggttcaagtacatcttagattccatctactccaagagactctctttctcaccatccaaattctggacagatatctggaggttcaacccgtgtccaaaaataaacttcagttggtcggtgtgacatccatgctgattgcagccaagtatgaggagatgtacccgccagagattggggactttgtgtacatcacagacaacgcttacaccaaggcacagattcgttccatggagtgcaatatcctcaggaggctagatttcagtctcggtaaaccactctgcattcacttcctcagacgcaactcaaaggctggaggggttgatggtcaaaaacacaccatggccaagtacctgatggagctaacactaccagaatacgcattcgtcccatatgacccatcagagattcctgcagctgccctgtgcttatccagtaagatccttgaaccagacatggaatggggtaccacactagtccattacagcgcatacagtgaagatcacctgatgcctattgtgcagaagatggccctcgtcctcaagaatgcaccaacagcaaaattccaggtacttgagattctgtgtggccttttactttgctgtttagattgccttgtggcttcttacccccaattaaaaaaaaaaattgtctaa

SEQ ID NO: 7348 - protein, 383 aa, Marthasterias glacialis
MLNGENVDSRIMGKVATRASSKGVKSTLGTRGALENISNVARNNLQAGAKKELVKAKRGMTESKATSSLQSVMGLNVEPMEKAKPQSPEPMDMSEINSALEAFSQNLLVGVEDIDKNDFDNPQLCSEFVNDIYQYMRKLEREFKVRTDYMTIQEITERMRSILIDWLVQVHLRFHLLQETLFLTIQILDRYLEVQPVSKNKLQLVGVTSMLIAAKYEEMYPPEIGDFVYITDNAYTKAQIRSMECNILRRLDFSLGKPLCIHFLRRNSKAGGVDGQKHTMAKYLMELTLPEYAFVPYDPSEIPAAALCLSSKILEPDMEWGTTLVHYSAYSEDHLMPIVQKMALVLKNAPTAKFQVLEILCGLLLCCLDCLVASYPQLKKKIV

SEQ ID NO: 7349 - DNA, 1395 bp, Homo sapiens
  CDS (1)..(1395)
atggagaccggctttcccgcaatcatgtaccctggatcttttattgggggctggggagaagagtatctcagctgggaaggaccggggctcccagatttcgtcttccagcagcccgtggagtctgaagcaatgcactgcagcaaccccaagagtggagttgtgctggctacagtggcccgaggtcccgatgcttgtcagatactcaccagagccccgctgggccaggatcccccgcagaggacagtgctagggctgctaactgcaaatgggcagtacaggaggacctgtggccaggggatcacaagaatcaggtgttattctggatcagaaaatgccttccctccagctggaaagaaagcactccctgactgtggggtccaagagccccccaagcaagggtttgacatctacatggatgaactagagcagggggacagagacagctgctcggtcagagaggggatggcatttgaggatgtgtatgaagtagacaccggcacactcaagtcagacctgcacttcctgctggatttcaacacagtttcccctatgctggtagattcatctctcctctcccagtctgaagatatatccagtcttggcacagatgtgataaatgtgactgaatatgctgaagaaatttatcagtaccttagggaagctgaaataaggcacagacccaaagcacactacatgaagaagcagccagacatcacggaaggcatgcgcacgattctggtggactggctggtggaggttggggaagaatataaacttcgagcagagaccctgtatctggctgtcaacttcctggacaggttcctttcatgtatgtctgttctgagagggaaactgcagctcgtaggaacagcagctatgcttttggcttcgaaatatgaagagatatatcctcctgaagtagacgagtttgtctatatcaccgatgatacatacacaaaacgacaactgttaaaaatggaacacttgcttctgaaagttctagcttttgatctgacagtaccaaccaccaaccagtttctccttcagtacttgaggcgacaaggagtgtgcgtcaggactgagaacctggctaagtacgtagcagagctgagtctacttgaagcagatccattcttgaaatatcttccttcactgatagctgcagcagctttttgcctggcaaactatactgtgaacaagcacttttggccagaaacccttgctgcatttacagggtattcattaagtgaaattgtgccttgcctgagtgagcttcataaagcgtaccttgatataccccatcgacctcagcaagcaattagggagaagtacaaggcttcaaagtacctgtgtgtgtccctcatggagccacctgcagttcttcttctacaataa

SEQ ID NO: 7350 - protein, 464 aa, Homo sapiens
METGFPAIMYPGSFIGGWGEEYLSWEGPGLPDFVFQQPVESEAMHCSNPKSGVVLATVARGPDACQILTRAPLGQDPPQRTVLGLLTANGQYRRTCGQGITRIRCYSGSENAFPPAGKKALPDCGVQEPPKQGFDIYMDELEQGDRDSCSVREGMAFEDVYEVDTGTLKSDLHFLLDFNTVSPMLVDSSLLSQSEDISSLGTDVINVTEYAEEIYQYLREAEIRHRPKAHYMKKQPDITEGMRTILVDWLVEVGEEYKLRAETLYLAVNFLDRFLSCMSVLRGKLQLVGTAAMLLASKYEEIYPPEVDEFVYITDDTYTKRQLLKMEHLLLKVLAFDLTVPTTNQFLLQYLRRQGVCVRTENLAKYVAELSLLEADPFLKYLPSLIAAAAFCLANYTVNKHFWPETLAAFTGYSLSEIVPCLSELHKAYLDIPHRPQQAIREKYKASKYLCVSLMEPPAVLLLQ

SEQ ID NO: 7351 - DNA, 1197 bp, Mus musculus
  CDS (1)..(1197)
atggcgctgctccgacgcccgacggtgtccagtgatttgaagaatattgacacagaagttattcctaaagccaagagccatgtgactatccggcgggcagttttagaagaaattggaaataaagttagaaacagaaccactcaggtggcgaagaaacctcagaacaccaaagtaccagctctgcccaccaaagtgacaaatgtcaacaagcagccgaaacccacagcctctgtgaaaccagtgcagatggaggcgctagctcccaaggatcgtcctcccgcccctgaggatgtctccatgaaggaagagagcctctgccaagctttctctgatgctctgctctgcaagatcgaggacatagataacgaggacagggagaaccctcagctctgcagtgactacgtgaaggacatctaccagtacctcaggcagcttgaggttttacagtccattaatccacacttcttagatggaagagatataaatggacgtatgcgtgccatcctggtggactggctggtccaagtccattccaagtttcggcttctgcaggaaactctgtacatgtgcattgccatcatggaccggttcctgcaggctcagctggtctgccggaagaaactgcagctggtcgggatcacagctctgctcctggcttccaaatatgaggagatgttttctccaaatatcgaagactttgtttatatcacagataatgcttacaccagttcccaaatccgagaaatggagactctgattttgaaagagttgaaatttgagttgggccgacctttgccacttcacttcttaaggcgagcctcaaaagccggagaggtggatgttgaacagcacactttagccaagtacctgatggagctgacgctcgtcgactatgacatggtgcactaccatccttctcaggtggcagccgctgcctcttgcctgtctcagaaggtgctgggccaaggaaaatggaatttgaagcagcagtattacacaggctacatggagagtgaagtcctggaagtcatgcagcacatggccaagaacgttgtgaaagtcaatgacaaccgtaccaagttcatcgctgtcaagaacaagtatgccagcagcagactcctgaagatcagcacgatccctcagctgaactccaaaatcatcaaagacctggcctcccctctgctgggcagcccctag

SEQ ID NO: 7352 - protein, 398 aa, Mus musculus
MALLRRPTVSSDLKNIDTEVIPKAKSHVTIRRAVLEEIGNKVRNRTTQVAKKPQNTKVPALPTKVTNVNKQPKPTASVKPVQMEALAPKDRPPAPEDVSMKEESLCQAFSDALLCKIEDIDNEDRENPQLCSDYVKDIYQYLRQLEVLQSINPHFLDGRDINGRMRAILVDWLVQVHSKFRLLQETLYMCIAIMDRFLQAQLVCRKKLQLVGITALLLASKYEEMFSPNIEDFVYITDNAYTSSQIREMETLILKELKFELGRPLPLHFLRRASKAGEVDVEQHTLAKYLMELTLVDYDMVHYHPSQVAAAASCLSQKVLGQGKWNLKQQYYTGYMESEVLEVMQHMAKNVVKVNDNRTKFIAVKNKYASSRLLKISTIPQLNSKIIKDLASPLLGSP

SEQ ID NO: 7353 - DNA, 1167 bp, Sphaerechinus granularis
  CDS (1)..(1167)
atgatggctcataccacaagaaattcaaatatgaactctcttggtttaaaaaagctgcagagtttcgacaatgaaaatgctggtgcgaggcttggtgcaaagagcatggctgttcaaaagcctgcgcagagggctgctctgggcaacattagcaacatgatgcgcaccacacaggttgctggtaaaaaggttgtgaagaaagatgtcaggacaaaaacgatggtgaaatccaaggctacatcatctctccagtctgtagcaagtttaccagtttctgtggacaacgtcaagccagatatctgtaggtcacccttgccgcaagtagttgataaaatggaggttgattcagtggaatcggccattgaagcattttctcaacaactgatcgatctgcaagtagaagacatcgacaaagacgacggtgacaaccctcagctgtgcagtgaatacgccaaagagatctacctgtacatgagaagcttagagaagcaaatgcaggtacccgcttcttatcttgatagagagggtcagctgacaggtcgtatgcgtcacatcctggtcgattggttagttcaagttcatctgaggtttcatcttctccaagagacactcttcctcacagtccaactcatagatagattcctggttgatcacacagtctccaaaggaaagctgcagcttgtgggtgtgacagcaatgttcattgccagcaagtatgaagagatgtaccctcccgaaatcaatgactttgtttacatcactgaccaagcatacaccaagacacagatcagacagatggaggttgtcatgttgaaggggctcgggtacagtctaggcaaacctctttgccttcacttcctccgacgcaactcaaaggcagctatggtcgatccacagaagcacacactagccaagttcttgatggagataactctgccagagtacaacatggtgcaatatgatccctctgagattgctgcagcagccatctacatgtccatgacattattgggttcagaaggggacagctggggagctaagatgacacattacagcatgtacaatgaagatcacatcaaacccattgttaagaagatggccaaggctgttattaggaacgatgccatgacagaaaagtatcatgtgagtttacataccatgaagtaa

SEQ ID NO: 7354 - protein, 388 aa, Sphaerechinus granularis
MMAHTTRNSNMNSLGLKKLQSFDNENAGARLGAKSMAVQKPAQRAALGNISNMMRTTQVAGKKVVKKDVRTKTMVKSKATSSLQSVASLPVSVDNVKPDICRSPLPQVVDKMEVDSVESAIEAFSQQLIDLQVEDIDKDDGDNPQLCSEYAKEIYLYMRSLEKQMQVPASYLDREGQLTGRMRHILVDWLVQVHLRFHLLQETLFLTVQLIDRFLVDHTVSKGKLQLVGVTAMFIASKYEEMYPPEINDFVYITDQAYTKTQIRQMEVVMLKGLGYSLGKPLCLHFLRRNSKAAMVDPQKHTLAKFLMEITLPEYNMVQYDPSEIAAAAIYMSMTLLGSEGDSWGAKMTHYSMYNEDHIKPIVKKMAKAVIRNDAMTEKYHVSLHTMK

SEQ ID NO: 7355 - DNA, 1254 bp, Sphaerechinus granularis
  CDS (1)..(1254)
atgatggctcataccacaagaaattcaaatatgaactctcttggtttaaaaaagctacagagtttcgacaatgaaaatgctggtgcgaggcttggtgcaaagagcatggctgttcaaaagcctgcgcagagggctgctctgggcaacattagcaacatgatgcgcaccacacaggttgctggtaaaaaggttgtgaagaaagatgtcaggacaaaaacgatggtgaaatccaaggctacatcatctctccagtctgtagcaaaattaccagtttctgtggacaacgtcaagccagatatctgtaggtcacccttgccgcaagtagttgataaaatggaggttgattcagtggaatcggccattgaagcattttctcaacaactgatcgatctgcaagtagaagacatcgacaaagacgacggtgacaaccctcagctgtgcagtgaatacgccaaagagatctacctgtacatgagaagcttagagaagcaaatgcaggtacccgcttcttatcttgatagagagggtcagctgacaggtcgtatgcgtcacatcctggtcgattggttagttcaagttcatctgaggtttcatcttctccaagagacactcttcctcacagtccaactcatagatagattcctggttgatcacacagtctccaaaggaaagctgcagcttgtgggtgtgacagcaatgttcattgccagcaagtatgaagagatgtaccctcccgaaatcaatgactttgtttacatcactgaccaagcatacaccaagacacagatcagacagatggaggttgtcatgttgaaggggctcgggtacagtctaggcaaacctctttgccttcacttcctccgacgcaactcaaaggcagctatggtcgatccacagaagcacacactagccaagttcttgatggagataactctgccagagtacaacatggtgcaatatgatccctctgagattgctgcagcagccatctacatgtccatgacattattgggttcagaaggggacagctggggagctaagatgacacattacagcatgtacaatgaagatcacatcaaacccattgttaagaagatggccaaggctgttattaggaacgatgccatgacagaaaagtatcatgctgtaaagacgaaataccgcagcagtcggtttatgaacatcagcgctctcccagagctggaatccgatctcatcaaatcattagcggaagaaagtgaagaacggatgtga

SEQ ID NO: 7356 - protein, 417 aa, Sphaerechinus granularis
MMAHTTRNSNMNSLGLKKLQSFDNENAGARLGAKSMAVQKPAQRAALGNISNMMRTTQVAGKKVVKKDVRTKTMVKSKATSSLQSVAKLPVSVDNVKPDICRSPLPQVVDKMEVDSVESAIEAFSQQLIDLQVEDIDKDDGDNPQLCSEYAKEIYLYMRSLEKQMQVPASYLDREGQLTGRMRHILVDWLVQVHLRFHLLQETLFLTVQLIDRFLVDHTVSKGKLQLVGVTAMFIASKYEEMYPPEINDFVYITDQAYTKTQIRQMEVVMLKGLGYSLGKPLCLHFLRRNSKAAMVDPQKHTLAKFLMEITLPEYNMVQYDPSEIAAAAIYMSMTLLGSEGDSWGAKMTHYSMYNEDHIKPIVKKMAKAVIRNDAMTEKYHAVKTKYRSSRFMNISALPELESDLIKSLAEESEERM

SEQ ID NO: 7357 - DNA, 1215 bp, Asterina pectinifera
  CDS (1)..(1215)
atgtctctgagagtgagaggaacaacgaacatccttggcactgccaagcttggcatgctgaacagtgaaaacgctgatgccagaatgaacggaaagatggtgaccagggcaacaacaaagaccatcaaatcaacattgggaacaagaggcgctctggagaacatcagcaatgtagcaaagaacaatgtacaagctgcagctaagaaggagatcaaacaaaagagaggaatgaccaaatccaaagctacaagttctctacagtcggtcattggtctccatgtagaacctgtggaaaaggtccagtcgccagaacccatggacatgagtgaagtcagcaatgctctggaggctttctcacagaacattcttgagatgggcgtcgatgatattgacaaagatgaccatgaaaatccacagctgtgcagcgagtacgtcaacgacatctatcactacatgagacatctggagcgtgagttcaaagtgagaacagactacatggcaatgcaagagatcacagagcgaatgagaacgatcctgattgactggctggtccaagtacatctcagattccatcttctacaggaaaccctcttccttaccatccagatcctcgacagatacctagaggtgcaagcagtatcaaagaccaaactccagctggttggtgtgacctccatgctgattgctgccaagtatgaagagatgtacccgccagagattggagactttgtctacatcacggacaacgcttacagcaaggcacagatccgcgccatggagtgtaacattctccggaaactagacttcaatctgggcaagccactctgcattcacttcctcagacgttgctcaaaggctggtggggttgatggtcacaagcacacgttgtccaagtacatcatggagttgacgttaccagagtacagctttgtcaagtatgatccatcggagattgctgctgcagccctctgcttatcaaccaagattctggatgaggatatggaatggaacaaaaccctggttcactacagtgcctacagtgaaggccacctggcaccaattgtgcagaagatggccgtgctcctcaacaacgcacccaagtccaaattccaggctgtcaggaagaagtatgccagcagcaagttcatgagcatcagcagctcccaagaactgaaatcaacggtaatcactgatcttgccgacgagaactgctga

SEQ ID NO: 7358 - protein, 404 aa, Asterina pectinifera
MSLRVRGTTNILGTAKLGMLNSENADARMNGKMVTRATTKTIKSTLGTRGALENISNVAKNNVQAAAKKEIKQKRGMTKSKATSSLQSVIGLHVEPVEKVQSPEPMDMSEVSNALEAFSQNILEMGVDDIDKDDHENPQLCSEYVNDIYHYMRHLEREFKVRTDYMAMQEITERMRTILIDWLVQVHLRFHLLQETLFLTIQILDRYLEVQAVSKTKLQLVGVTSMLIAAKYEEMYPPEIGDFVYITDNAYSKAQIRAMECNILRKLDFNLGKPLCIHFLRRCSKAGGVDGHKHTLSKYIMELTLPEYSFVKYDPSEIAAAALCLSTKILDEDMEWNKTLVHYSAYSEGHLAPIVQKMAVLLNNAPKSKFQAVRKKYASSKFMSISSSQELKSTVITDLADENC

SEQ ID NO: 7359 - DNA, 1599 bp, Adiantum capillus
  CDS (1)..(1599)
atgtcggaacagggctgctacactgattgctggggggccatttggtggatctgggaatcagggatcaaagcaatggcagggctagaaggagagattcagacaaggcgactgagaggaagagagatccctgttttgcctcccgtgactcgctctgcagctgcctcggctgcaaatgtaggatacaatgagaacactaggaagacaaaggtgtccaccaaacgggctgctgctgatgatactagctcccgtgttgcaagtaatgtacctgttcagcatgctaagaaacgtgctgcactggcaaatctcactaatcagtctaattctgcaatcacccgcaactcgagcctgccctccaagtctcatgcttcagctgtgaatggaaaaacacgtgctgctgctggtcaagtgaaggaagttcagcaagtagctcaacaagtggtcgagcctcttcaagaggttggtcgggagccaaacactggccgaagttctttagccaacagttccatcacttttgacaatgatgaaaatgcgtgtcctgaaagagccacaagctcagtgggcatgaagtctcgaactttggatgtcctacagctggttggaaatgaaaacaagacagttgcatcactggagcggaagactcagcatagcttgtacatctcaaaagacacgaagccccgtgctcggcaaggtggcttatttgaagactgtaaagacgataatgaggagggaggatggtccagcaaaaactacatggatattgacaatcacaaggatccacagatgtgtagtgcatatgctgctgaaatataccaccatctacgtatggctgagttaaagcgaaggccctctctgaattttatggacacagttcaacaggacatcaatgccagtatgaggggaattcttgtggattggcttgtggaggttgcggaggagtacaagcttgttcctgacacactttacttgacaatttcgtacattgatcgttttctctctggaaaccttgtcactagacagcgcttgcaactacttggtgtagcttccatgcttatagcatcgaagtatgaagagatttgtgcccctcaggtggatgagttttgttatatcactgataacacctacaatcgagaggaggttttggagatggaaaggagtgttttgaatcacttgcattttgagctcactggaccaacaaccaagagctttctccggcgtttcgttcgagctgcacaggcagggcagaagagccccactttgcaattagagtttcttgggaactaccttgctgagttaacacttttggagtatggttttcttcacttccttccatcaatgattgccggagctgctgtcttggtggctagagtcactctcaatcctacttggaggccatggaattcaaccctgcaacactattctggctataaggcctctgagctaaaggaatgtgccaaggctattcttgagctgcaaaagaacacgaaaaactgcacattgcctgcgattcgcgagaagtatagacaacacaagttcaaatgtgtggctacccttcatcctccagcatcgataccagccgaatattttgatgacatcgagtag

SEQ ID NO: 7360 - protein, 532 aa, Adiantum capillus
MSEQGCYTDCWGAIWWIWESGIKAMAGLEGEIQTRRLRGREIPVLPPVTRSAAASAANVGYNENTRKTKVSTKRAAADDTSSRVASNVPVQHAKKRAALANLTNQSNSAITRNSSLPSKSHASAVNGKTRAAAGQVKEVQQVAQQVVEPLQEVGREPNTGRSSLANSSITFDNDENACPERATSSVGMKSRTLDVLQLVGNENKTVASLERKTQHSLYISKDTKPRARQGGLFEDCKDDNEEGGWSSKNYMDIDNHKDPQMCSAYAAEIYHHLRMAELKRRPSLNFMDTVQQDINASMRGILVDWLVEVAEEYKLVPDTLYLTISYIDRFLSGNLVTRQRLQLLGVASMLIASKYEEICAPQVDEFCYITDNTYNREEVLEMERSVLNHLHFELTGPTTKSFLRRFVRAAQAGQKSPTLQLEFLGNYLAELTLLEYGFLHFLPSMIAGAAVLVARVTLNPTWRPWNSTLQHYSGYKASELKECAKAILELQKNTKNCTLPAIREKYRQHKFKCVATLHPPASIPAEYFDDIE

SEQ ID NO: 7361 - DNA, 1185 bp, Rana dybowskii
  CDS (1)..(1185)
atggctactcgccgggctgctatttcacgtgaagttgacaatgctgttggagcgatgagatcaaaggcccagctgaacagtagaagagctgctctgggagaaatcggtaacaaggtgacagtgcgcgctgtaaagcagcctgccaagacctcaaatgccacatcaaagactacaagacctgttgccaaagtatcaaatgtgagtgtgaagccaaaggctgtagctgtgacggtgattgaggccccctcacaagcaaaagaagcttctccagttcctatggatgtgtcaatgaaggaagaggaggaactgtgtcaagctttctcagaggtcctaaatcatgtggtagacattgatgctgaagatggtggtaatccacagctctgcagcgagtatgtcgtggatatctacaactacttgagagagcgggaggtccagcagtccataaaacaaagatatctggatggaatggagattaatgaacgcatgagagccatcctggttgactggctgatccaagtaaactccaggttccagtttcttcaggaaactctatacatgggcattgccatcatggatcgatttcttcaagttcagcctatctcgcgtggcaaacttcagctggttggtgtgacttcactcttgttggcttcaaaatatgaagagatgtatagtccagaagttgcagactttgcttatatcacggacaatgcttacacaacatcccagattagagaaatggagatgattatccttcgtgagcttaaatttgacttggggcggccacttccccttcacttccttcgacgtgcttcaaaggcatgcagtgctgatgcagagcagcacacactagcaaagtacctaatggagcttacccttgttgactatgaaatggtccattttcatccttctgagattgccgctgctgcactttgcttggctcaaaaggtccttggagttggcagctggggttccacacagcaccactacacgggctacacagaggaagatctgactccaatcataaagcatatcgctaaaaatgtaaccaaagtcaaccagaatcggacaaagcacgtggctgtaaggaataagtacgccagcagcaagctgatgaaaatcagtacacatccccagctgatgtctctagttattacagaactggctgcaagtctaacttcccagtaa

SEQ ID NO: 7362 - protein, 394 aa, Rana dybowskii
MATRRAAISREVDNAVGAMRSKAQLNSRRAALGEIGNKVTVRAVKQPAKTSNATSKTTRPVAKVSNVSVKPKAVAVTVIEAPSQAKEASPVPMDVSMKEEEELCQAFSEVLNHVVDIDAEDGGNPQLCSEYVVDIYNYLREREVQQSIKQRYLDGMEINERMRAILVDWLIQVNSRFQFLQETLYMGIAIMDRFLQVQPISRGKLQLVGVTSLLLASKYEEMYSPEVADFAYITDNAYTTSQIREMEMIILRELKFDLGRPLPLHFLRRASKACSADAEQHTLAKYLMELTLVDYEMVHFHPSEIAAAALCLAQKVLGVGSWGSTQHHYTGYTEEDLTPIIKHIAKNVTKVNQNRTKHVAVRNKYASSKLMKISTHPQLMSLVITELAASLTSQ

SEQ ID NO: 7363 - DNA, 1200 bp, Rana dybowskii
  CDS (1)..(1200)
atgtctctccgcatcacccggaacatgctgtccaatgcagagaacaacgtgaagagtggagttgtcgggaagattgcggctaagccagtactgcgttcccgtgctgccctgggcgatattgggaacaaagcggagaccaagatgcccctaaagaaggaactaaaaccagctgtgaaacttgtaaagaaagtgaagccggcagagaaggttccggagccaaagaaagtgaaggaggaagccgtctgcataaagccacagcctgtgccgatagaggtccccagctctcccagccccatggagacatcaggctgccacccagatgagctttgccaggccttctcagacgtcctcatccaggtgaaggatgtggatatcgatgacgatgggaaccccatgctgtgcagtgaatatgtgaaggacatctactgctatctgaggagtctggaggaagctctggcggtgaggccacattatctccaaggccaggaggtgacaggcaacatgcgggcgattctcgtagactggctggtccaagtgcagatgaagttccgccttctgcaagaaaccatgttcatgacagttggaatcattgatcggttcttgcaggataacccagttcccaagaaccagctccagctggtgggggtgtcggccatgtttcttgctgccaagtacgaggagatgtatcccccagagatcggagacttcaccttcgtgacagatcacacctacaccaaggcccagatcagagagatggagatgaagattcttcgcgccctgaatttctccatgggccggcccctccccctgcacttcctccgcagggcctccaagatcggcgaggttacagcggagcagcacagtctggccaaatatctgatagaactggtcatggtggactatgagatggtgcactaccctccctcacagatcgcagctgctgcttcctgcctgtccatgaaggtcctgaattctggggactggacaccaacgctgcagcactacaccttgtacgccgaagactctctgcttcccataatgcagcacatggccaagaacgtggtgaaggtcaacaaaggactcacaaagcaattgactgtgaagaacaagtatggcagcagcaaacagatgaagatcagcaccattccccagctgaggtcagaggtccttgccagtctggcgcgggctgtcatgccataa

SEQ ID NO: 7364 - protein, 399 aa, Rana dybowskii
MSLRITRNMLSNAENNVKSGVVGKIAAKPVLRSRAALGDIGNKAETKMPLKKELKPAVKLVKKVKPAEKVPEPKKVKEEAVCIKPQPVPIEVPSSPSPMETSGCHPDELCQAFSDVLIQVKDVDIDDDGNPMLCSEYVKDIYCYLRSLEEALAVRPHYLQGQEVTGNMRAILVDWLVQVQMKFRLLQETMFMTVGIIDRFLQDNPVPKNQLQLVGVSAMFLAAKYEEMYPPEIGDFTFVTDHTYTKAQIREMEMKILRALNFSMGRPLPLHFLRRASKIGEVTAEQHSLAKYLIELVMVDYEMVHYPPSQIAAAASCLSMKVLNSGDWTPTLQHYTLYAEDSLLPIMQHMAKNVVKVNKGLTKQLTVKNKYGSSKQMKISTIPQLRSEVLASLARAVMP

SEQ ID NO: 7365 - DNA, 1173 bp, Xenopus laevis
  CDS (1)..(1173)
atggctacttgggctgctatgcgtacaggacagatggacaatgcagtcgtgggtggagtggtggcagccaaagtgaaagtacatggacatagacccccactagaagaaatcagtaacaggactgcaattctaggacgcaaacctgcagcgatgaactgcaaggtgcctgtcaaagtggtcagacaagtaacctccagagcaaatctgcctttaagagttaaacaggcatttggccccaaatctgaggaacctcctcccatacctatggatgtagctgataacgaggaggtgttgtgtcaagctttctctgaagctttgaacagtgttgaggatattgatgcagaggattcttcaaaccctcagttatgcgcggattatgtgaaggacatctattcctatttaaggcagttagaggttcaacaggctgtacgcccaagacacctacagggaatggagatcaatgatcggatgagagccattctagtcgactggttaatacaagtccacttaaaatttcaactacttcaagagacattatatatggcaatagcaattatggaccgttttctacagggtcagcctatctcccgaagcaagctacagttggttggtgtcacctcgctcttcatagcttcaaagtatgaagaaatgtattatccagagatttctgactttgtttacatcactgacaacacctactccaaaactcaaattagagaaatggaaatgatgattctcaaggagattaactttgatctaggaagaccgctgccccttaatttccttagaagagcttcaaaatgttgcagtgctgatgcaggacagcacacacttgccaagtacttcatggagttgactctacttgactatgacatggttcacttccatccttcagcaattgctgctgctgctttgtgcctgacccaaaaggttcttaatatgggcacatgggatgctgctctacagttttacacaggctattcacaagatgatcttagcctgcctatgaagcatatggccaagaacatcgttcaggtcaaccaaaacctgtcaaaatttttatctgtgaagaataaatattctagtagtaaattactgaagatcagcacaatccctcaactgaactcgcgtgttttaactggtcttgctgctgctgtaacgccaggctcgtag

SEQ ID NO: 7366 - protein, 390 aa, Xenopus laevis
MATWAAMRTGQMDNAVVGGVVAAKVKVHGHRPPLEEISNRTAILGRKPAAMNCKVPVKVVRQVTSRANLPLRVKQAFGPKSEEPPPIPMDVADNEEVLCQAFSEALNSVEDIDAEDSSNPQLCADYVKDIYSYLRQLEVQQAVRPRHLQGMEINDRMRAILVDWLIQVHLKFQLLQETLYMAIAIMDRFLQGQPISRSKLQLVGVTSLFIASKYEEMYYPEISDFVYITDNTYSKTQIREMEMMILKEINFDLGRPLPLNFLRRASKCCSADAGQHTLAKYFMELTLLDYDMVHFHPSAIAAAALCLTQKVLNMGTWDAALQFYTGYSQDDLSLPMKHMAKNIVQVNQNLSKFLSVKNKYSSSKLLKISTIPQLNSRVLTGLAAAVTPGS

SEQ ID NO: 7367 - DNA, 1182 bp, Xenopus laevis
  CDS (1)..(1182)
atggctctgattatgacaaggagtatgcggctcaatgcagagaatgtggcacaaggaatggctggaaagaaagctgctgtgtccaagcctgtaccaaagcctagaaatgcactgggtgatattggcaaccaaatcggaaaggcaaaagttccactaaaaaagacaacaaaagctcttcggaaacccactgtacaaaagtctgagaaacttgctgtgctggaagaaaatgttcctaaggaagcagagaaggcagcaccagattcccctagccccatggagacatcggtgtgtgtaatagaagagatgcaaccggaaccagctttctccagtgccctgattcctgtgacagatgtggatgcagaagattcagacaacccaatgctgtgcagtgattatgtgaaggacatctactgttatcttagaaacttggaggctgaacaagcaatcgggccacactatctagatgggcaagagatcaatggaaacatgagggccatactggtagactggcttgtgcaggttcaactgaggtttaaactgctgcaggagacaatgtctatgactgtatctattctggatcgttttctgcaggaaaaccctgtacccaagaagctgttgcagctggccggtgtgagcgccatgtttattgcatgcaagtatgaagagatctattgtccatcaattggtgactttgtctttgtcacagacaacacttacacaaagtcccaaatcagaaacatggagatgcaaatccttagagttctcaattttgacattggaagaccactgccgctgcatttcttgagaagagcatctaaaattggagaggttgactctgtacatcacacactggctaaatacctaatcgagctggttatgacagactatgacatggtgcacatacctccatcacagttggcggcagcagctttctgtctggcaatgaaaattcttaatagtggagaatggactcctactcttgagcactacatggcatacaaagaaagttcccttacaccagtcatgcagcacatcgcaaagaatattgtaaaagtcaatggaggacatacaaagttcatgtctgtcaaaaacaaatacaccagcagtcgacagatgaagatcagctgtctgccacatctcaagtctgagcttgtggaaaacctggcaaaagctgcatcatag

SEQ ID NO: 7368 - protein, 393 aa, Xenopus laevis
MALIMTRSMRLNAENVAQGMAGKKAAVSKPVPKPRNALGDIGNQIGKAKVPLKKTTKALRKPTVQKSEKLAVLEENVPKEAEKAAPDSPSPMETSVCVIEEMQPEPAFSSALIPVTDVDAEDSDNPMLCSDYVKDIYCYLRNLEAEQAIGPHYLDGQEINGNMRAILVDWLVQVQLRFKLLQETMSMTVSILDRFLQENPVPKKLLQLAGVSAMFIACKYEEIYCPSIGDFVFVTDNTYTKSQIRNMEMQILRVLNFDIGRPLPLHFLRRASKIGEVDSVHHTLAKYLIELVMTDYDMVHIPPSQLAAAAFCLAMKILNSGEWTPTLEHYMAYKESSLTPVMQHIAKNIVKVNGGHTKFMSVKNKYTSSRQMKISCLPHLKSELVENLAKAAS

SEQ ID NO: 7369 - DNA, 1962 bp, Neurospora crassa
  CDS (1)..(1962)
atggacgcaaagccccagcgtcctctgtgggctcctcccgttcgatacggtgacgagaatatcccacctgccgatccgactcatcaaagtaagaggtcggacagcaagatcaaggcaatgatggcggttaacggcaccttgaacgcaccacccaagagggctgcctgcttcgacaagagcaacacctcgaagccactagccgacggcgggaacaaggacatgctgaagaacagggtgaaaccgatggtcacaaccagcagcactcgagacctacggtcggatggcagggagaataaccgctcggcagcggaggagcattatatgcggccaacggcgacctcgaaggcagcatcacacggccaccaaaagtattcttcgacggctcccctatcatcccatgccgccagcggggcatacggtggcattcgctcacacaatgccatcgccaaactctccgcaccggtcaagaaaacgaccaacgtataccgcgacaacaaagtcaaggaggagagcacatctcatgcgcccacttcctcgtcagttgatgatcttgttgcgatggtcgacaagcatattaaggatccacgccactacaaaagtcaaccgcaactcaagtcggaccagcagcataccctacaccggaatcagagcaaatacgtgcccaattacgagaacctgaatgacgtggatgatcccgacgattcaaatgccgattacgccgagtcttacgaggacgcggtcgagcaattatccagagatctcgatattcctgcgaacactgatcctgcagctatcgtccacgcaaatcacatgtcaatcgcccaagccagttatgactcgatgcctcaaggcgcaccactcgcaccctcgaaaccagtcagggcccttccactgccccccaacgtctctgatcccgaagagtattctgaagatgacgacgatcaggacctctacgacgaccaaggatataccaccgcccattcttatcgatctcattgcgacaataccacaggaggacctcccacattagtcgcgcccaaatttaccgcggacatccagaaggaacttgacattgcgaaggcatgggttttggagcatcaaacggaggaagaggttgaggaagagaattgggatgtgagcatggtagctgagtacggcgacgagatctttgagtacttgcgcgagcttgaggaacggatgcttccgaatcctcactacatggacatccaaaccgagatccggtggtccatgcgatccgtcctcatggactggctggtccaggttcaccatcgcttcagtcttctcccggagaccctctttctcaccgtgaactacatcgaccgctttctttcagttaaggttgtttcgctgggcaagcttcaactggttggcgcgactgccattttcgtcgcagccaagtacgaggagatcaactgcccttccattcaggaacttgtgtacatggtggatcagggatactctgttgaggagattctaaaggcagagaagttcatgctcaccatgctgaacttcgaacttggttggccaggcccgatgagcttccttcggcgcattagcaaagccgatgactacgatttggaaactcgaactcttgcaaagtacttgctcgaagtgactatcatggatgagcgttttgtgggctgccctgcgagttatcttgctgccggtgcccattgcctctcccgctttttcctgcaaagagggccatggacacatgcccatgttcacttttccggctatacgctggctcaattgaggccactcatcattagcatcctcgactgctgccaggaaccacgcaaacatcacggcgcggtatacgacaagtactctcatcagaggttcaagtccgcgtctactttcgtggaaggcaaaattgcgaacggtttcgtgctgccgattcgaacgaacgcttctatcagcgacagtgcgcaatcatag

SEQ ID NO: 7370 - protein, 653 aa, Neurospora crassa
MDAKPQRPLWAPPVRYGDENIPPADPTHQSKRSDSKIKAMMAVNGTLNAPPKRAACFDKSNTSKPLADGGNKDMLKNRVKPMVTTSSTRDLRSDGRENNRSAAEEHYMRPTATSKAASHGHQKYSSTAPLSSHAASGAYGGIRSHNAIAKLSAPVKKTTNVYRDNKVKEESTSHAPTSSSVDDLVAMVDKHIKDPRHYKSQPQLKSDQQHTLHRNQSKYVPNYENLNDVDDPDDSNADYAESYEDAVEQLSRDLDIPANTDPAAIVHANHMSIAQASYDSMPQGAPLAPSKPVRALPLPPNVSDPEEYSEDDDDQDLYDDQGYTTAHSYRSHCDNTTGGPPTLVAPKFTADIQKELDIAKAWVLEHQTEEEVEEENWDVSMVAEYGDEIFEYLRELEERMLPNPHYMDIQTEIRWSMRSVLMDWLVQVHHRFSLLPETLFLTVNYIDRFLSVKVVSLGKLQLVGATAIFVAAKYEEINCPSIQELVYMVDQGYSVEEILKAEKFMLTMLNFELGWPGPMSFLRRISKADDYDLETRTLAKYLLEVTIMDERFVGCPASYLAAGAHCLSRFFLQRGPWTHAHVHFSGYTLAQLRPLIISILDCCQEPRKHHGAVYDKYSHQRFKSASTFVEGKIANGFVLPIRTNASISDSAQS

SEQ ID NO: 7371 - DNA, 1284 bp, Arabidopsis thaliana
  CDS (1)..(1284)
atggcgacaggaccagttgttcatcctcaaccagttagaggtgatcccatcgacctcaaaaacgcagcagcaaagaatcgtcgtgctcttggcgacattggaaacgtcgattctcttattggagtcgaaggaggaaagcttaaccgccccattactcgtaactttcgtgctcagttgctagaaaacgcacaagttgcagccgccgctaacaaaaaggctccgattcttgatggagttactaagaaacaagaagttgtaagagcggttcaaaagaaagcaagaggtgataagcgtgagccgtcaaaaccaatcgaagtgattgtgataagtcctgatacaaacgaggttgctaaagctaaagagaacaagaagaaagtgacatactcttcggttcttgatgctcgaagcaaggtagattctttgttcaacattgaaagcataatgtgcaaagctgcttctaagactttggatattgattatgtcgacaaagaaaatgatcttgctgctgtggaatacgttgaggatatgtacattttctacaaagaagttgtgaatgagagcaaacctcagatgtatatgcatacacaacctgagattgatgagaagatgagatcaatccttattgattggcttgtagaagttcatgtcaagtttgatctctcccctgagactctttacctcactgtcaacataattgatcgttttctttctctgaagactgtgcctagaagagaactacagcttgtaggtgttagtgctttgcttatagcttcgaagtacgaagaaatctggcctcctcaggtcaatgatttggtatatgtgactgataactcctacaacagcagacagattctagtgatggagaaaaccattttggggaatcttgaatggtacttgacagttccaacacagtatgtgttccttgtgaggtttattaaagcctcgggttctgaccagaaactggagaacttggttcactttctagctgagttgggtttgatgcatcacgacagtttaatgttctgtccttccatgcttgctgcatcagcggtctacacagcaaggtgttgcttgaacaagactcctacttggactgatacactgaaattccacacaggctactccgaatctcagctcatggattgctcaaagcttttagctttcattcactcgaaagcgggggagagcaagctacgtggtgtgttgaagaagtattcgaaacttggaagaggtgctgttgctctgatttcaccagccaagtctcttatgtcatctgctccatga

SEQ ID NO: 7372 - protein, 427 aa, Arabidopsis thaliana
MATGPVVHPQPVRGDPIDLKNAAAKNRRALGDIGNVDSLIGVEGGKLNRPITRNFRAQLLENAQVAAAANKKAPILDGVTKKQEVVRAVQKKARGDKREPSKPIEVIVISPDTNEVAKAKENKKKVTYSSVLDARSKVDSLFNIESIMCKAASKTLDIDYVDKENDLAAVEYVEDMYIFYKEVVNESKPQMYMHTQPEIDEKMRSILIDWLVEVHVKFDLSPETLYLTVNIIDRFLSLKTVPRRELQLVGVSALLIASKYEEIWPPQVNDLVYVTDNSYNSRQILVMEKTILGNLEWYLTVPTQYVFLVRFIKASGSDQKLENLVHFLAELGLMHHDSLMFCPSMLAASAVYTARCCLNKTPTWTDTLKFHTGYSESQLMDCSKLLAFIHSKAGESKLRGVLKKYSKLGRGAVALISPAKSLMSSAP

SEQ ID NO: 7373 - DNA, 1408 bp, Mus musculus
  CDS (84)..(1280)
ctcagcggcggggccctgaccctcccaacggtgtcgcagacgcgagtggctgtgcctcgtccgcacttgccagggcggccctcatggcgctgctccgacgcccgacggtgtccagtgatttgaagaatattgacacagaagttattcctaaagccaagagccatgtgactatccggcgggcagttttagaagaaattggaaataaagttagaaacagaaccactcaggtggcgaagaaacctcagaacaccaaagtaccagctctgcccaacaaagtgacaaatgtcaacaagcagccgaaacccacagcctctgtgaaaccagtgcagatggaggcgctactcccaaggatcgtcctcccgccccctgaggatgtctccatgaaggaagagagcctctgccaagctttctctgatgctctgctctgcaagatcgaggacatagataacgaggacagggagaaccctcagctctgcagtgactacgtgaaggacatctaccagtacctcaggcagcttgaggttttacagtccattaatccacacttcttagatggaagagatataaatggacgtatgcgtgccatcctggtggactggctggtccaagtccattccaagtttcggcttctgcaggaaactctgtacatgtgcattgccatcatggaccggttcctgcaggctcagctggtctgccggaagaaactgcagctggtcgggatcacagctctgctcctggctcccaaatatgaggagatgttttctccaaatatcgaagactttgtttatatcacagataatgcttacaccagttcccaaatccgagaaatggagactctgattttgaaagagttgaaatttgagttgggccgacctttgccacttcacttcttaaggcgagcctcaaaagccggagaggtggatgttgaacagcacactttagccaagtacctgatggagctgacgctcgtcgactatgacatggtgcactaccatccttctcaggtggcagccgctgcctcttgcctgtctcagaaggtgctgggccaaggaaaatggaatttgaagcagcagtattacacaggctacatggagagtgaagtcctggaagtcatgcagcacatggccaagaacgttgtgaaagtcaatgacaaccgtaccaagttcatcgctgtcaagaacaagtatgccagcagcagactcctgaagatcagcacgatccctcagctgaactccaaaatcatcaaagacctggcctcccctctgctgggcagcccctagacactggactgccatcctgcgcttctcagatcctgtatgtattttattctagtttacatcacaaacctcttctcaaactcattttctaattgtgtattgatgaaaaataaagctattgattttcttat

SEQ ID NO: 7374 - protein, 398 aa, Mus musculus
MALLRRPTVSSDLKNIDTEVIPKAKSHVTIRRAVLEEIGNKVRNRTTQVAKKPQNTKVPALPNKVTNVNKQPKPTASVKPVQMEALLPRIVLPPPEDVSMKEESLCQAFSDALLCKIEDIDNEDRENPQLCSDYVKDIYQYLRQLEVLQSINPHFLDGRDINGRMRAILVDWLVQVHSKFRLLQETLYMCIAIMDRFLQAQLVCRKKLQLVGITALLLAPKYEEMFSPNIEDFVYITDNAYTSSQIREMETLILKELKFELGRPLPLHFLRRASKAGEVDVEQHTLAKYLMELTLVDYDMVHYHPSQVAAAASCLSQKVLGQGKWNLKQQYYTGYMESEVLEVMQHMAKNVVKVNDNRTKFIAVKNKYASSRLLKISTIPQLNSKIIKDLASPLLGSP

SEQ ID NO: 7375 - DNA, 1194 bp, Carassius auratus
  CDS (1)..(1194)
atggctctccgtgtctcaaggaacactcgcctggccagcagcgagaatcagagcgctctgcccggaaaagcagctgtagccaacaagcccgggctgagaccccgggctgcgctgggggagattggcaacaatccccagacacgacaggctttgaggaagaaggaggtgaaggttgcacccaaggtggaggttgtggctgagaaagcacctgtggttcaacagcccaaaaaggaatctccaaaagttcagcatgacgttccgattgtgtccgagccctcctctcctgttcccatggagacctcaggctgtgcttcggatgatctgtgtcaggcgttctccgatgttctgcttgacatcaaggatgtggatgcagatgactatgataatcccatgctctgcagtgaatatgtcaaggacatctatttgtatctgcaccagcttgagatcacgcaagccgttaaaccgaaatatctcgaaggaaaggagattacaggaaatatgcgtgcaattcttattgactggcttgtacaagtccaaattaagttcaggctgcttcaggagaccatgtacatgactgttgcagtcattgatcgctttcttcaggatcatccagttccaaagaagcagctccagcttgttggtgtaacagccatgttcattgcctcaaagtatgaagagatgtacccaccagagattgcagactttgcttttgtgactgaccgtgcctacaccactggtcagatccgtgatatggagatgaaaatcctcagagtcctcgacttcagttttgggaaacctctgccactacagttcctcaggagagcctccaagattggagacgttactgcagagcatcacacactggccaagtacttcctggagctcaccatggtggactatgatatggtccactttcctccctctcaggtggctagcgcagcttatgccctaactctgaaggtcttcaactgtggtgactggacccctactcttcagcattatatgggctacactgaggattcactggttcctgtgatgcagcatattgccagaaatgtcgtgagagtcaatgaggggctttcaaagcatctggctgtgaagaacaagtactccagtcaaaagcagatgagaattgcttcaatttctcagcttaagtcatccttgatcaaggacctggccaagcaaatctcgtag

SEQ ID NO: 7376 - protein, 397 aa, Carassius auratus
MALRVSRNTRLASSENQSALPGKAAVANKPGLRPRAALGEIGNNPQTRQALRKKEVKVAPKVEVVAEKAPVVQQPKKESPKVQHDVPIVSEPSSPVPMETSGCASDDLCQAFSDVLLDIKDVDADDYDNPMLCSEYVKDIYLYLHQLEITQAVKPKYLEGKEITGNMRAILIDWLVQVQIKFRLLQETMYMTVAVIDRFLQDHPVPKKQLQLVGVTAMFIASKYEEMYPPEIADFAFVTDRAYTTGQIRDMEMKILRVLDFSFGKPLPLQFLRRASKIGDVTAEHHTLAKYFLELTMVDYDMVHFPPSQVASAAYALTLKVFNCGDWTPTLQHYMGYTEDSLVPVMQHIARNVVRVNEGLSKHLAVKNKYSSQKQMRIASISQLKSSLIKDLAKQIS

SEQ ID NO: 7377 - DNA, 1194 bp, Carassius auratus gibelio
  CDS (1)..(1194)
atggctctccgtgtctcaaggaacactcgcctggccagcagcgagaatcagagcgctctgcccggaaaagcagctgtagccaacaagcccggactgagaccccgggctgcgctgggggagattggcaacaatccccagacacgacaggctttgaggaagaaggaggtgaaggttgcacccaaggtggaggttgtggctgagaaagcacctgtggttcaacagcccaaaaaggaatctccaaaagttcagcatgacgttccgattgtgtccgagccctcctctcctgttcccatggagacctcaggctgtgcttcggatgatctgtgtcaggcgttctccgatgttctgcttgacatcaaggatgtggatgcagatgactatgataatcccatgctctgcagtgaatatgtcaaggacatctatttgtatctgcaccagcttgagatcacgcaagccgttaaaccgaaatatcttgaaggaaaggagattacaggaaatatgcgtgcaattcttattgactggcttgtacaagtccaaattaagttcaggctgcttcaggagaccatgtacatgactgttgcaatcattgatcgcttccttcaggatcatccagttccaaagaagcagctccagcttgtaggtgtaacagccatgttcattgcctcaaagtatgaagagatgtacccaccagagattgcagactttgcttttgtgactgaccgtgcctatactactggtcagatccgggagatggagatgaaaatcctcagagttcttgacttcagttttgggagacctctgcctctacagttccttaggagagcttccaagattggagacgttactgcagagcatcatacactggccaagtacttcctggagctcaccatggttgactatgagatggtccactttcctccctcccaggtggctagcgcagcttatgcccttactctgaaggtcttcaactgtggtgactggacacctactctgcagcattatatgggctatactgaagatgcactagttcctgtaatgcagcatattgctaaaaatgttgtgagactcaatgaggggctttcaaagcatctggctgtgaagaacaagtactccagtcagaaacagatgagaattgcctcaatttctcaactcaagtcctccttgatcaaggacctggccaagcagatctcatag

SEQ ID NO: 7378 - protein, 397 aa, Carassius auratus gibelio
MALRVSRNTRLASSENQSALPGKAAVANKPGLRPRAALGEIGNNPQTRQALRKKEVKVAPKVEVVAEKAPVVQQPKKESPKVQHDVPIVSEPSSPVPMETSGCASDDLCQAFSDVLLDIKDVDADDYDNPMLCSEYVKDIYLYLHQLEITQAVKPKYLEGKEITGNMRAILIDWLVQVQIKFRLLQETMYMTVAIIDRFLQDHPVPKKQLQLVGVTAMFIASKYEEMYPPEIADFAFVTDRAYTTGQIREMEMKILRVLDFSFGRPLPLQFLRRASKIGDVTAEHHTLAKYFLELTMVDYEMVHFPPSQVASAAYALTLKVFNCGDWTPTLQHYMGYTEDALVPVMQHIAKNVVRLNEGLSKHLAVKNKYSSQKQMRIASISQLKSSLIKDLAKQIS

SEQ ID NO: 7379 - DNA, 1383 bp, Arabidopsis thaliana
  CDS (1)..(1383)
atggttagatcagatgaaaatagccttggattaatcggatcaatgagtctccaaggtaccctaaatcgatcgattttgttattaaaaatcaaaactttcgttctctttgatttttcccccaaattgattttgaatttacttgatgtagggggaggagtagtaggaaagatcaagacgacggcaacaacaggaccgacaagaagagcactaagtactattaacaagaacatcactgaagcgccgtcttacccttatgctgtcaacaagagatcagtttctgaaagagatggcatttgtaataaaccacctgtgcatcgaccagttactaggaagtttgctgctcagttagcagatcataagccacatatccgtgatgaggaaactaagaaaccagactcagtttcaagtgaagaaccagagacgattatcattgatgtggatgaaagtgataaagaaggaggtgactctaatgagccaatgtttgtacaacatactgaagcaatgctggaggagattgaacagatggagaaggagattgaaatggaagatgcagacaaagaagaagagcctgtgatcgatattgatgcctgtgataagaataatcctttggctgcggttgaatatatccatgatatgcataccttctacaagaattttgagaaacttagttgcgtgcctcctaactatatggacaatcaacaagatcttaatgagagaatgagaggaatcctcattgactggttaattgaggtgcactacaagtttgaactgatggaggaaactctttatctcacaatcaatgtcatcgacagattccttgcggttcatcaaatcgtgaggaaaaagcttcagcttgttggtgttactgctttgttgcttgcatgtaaatatgaagaagtttcagttccagtggtagatgatctcatcttgatctctgacaaagcttactctagaagagaagtgctagatatggagaagctaatggccaacaccttgcaattcaatttctctctaccaactccatatgttttcatgaaacgatttctcaaagctgcccaatctgacaagaagcttgagattttatcattctttatgatcgagctttgccttgtggagtatgagatgctagagtatcttccatctaagctggcggcctcagcaatctacactgctcagtgtacacttaagggatttgaagaatggagcaaaacctgtgagtttcacacaggctacaacgaaaaacagctactggcatgtgcgagaaagatggttgctttccatcacaaggcaggaacagggaagctcacaggagttcacagaaagtacaacacatctaagttctgtcatgctgcaagaactgaaccagctgggtttctgatttaa

SEQ ID NO: 7380 - protein, 460 aa, Arabidopsis thaliana
MVRSDENSLGLIGSMSLQGTLNRSILLLKIKTFVLFDFSPKLILNLLDVGGGVVGKIKTTATTGPTRRALSTINKNITEAPSYPYAVNKRSVSERDGICNKPPVHRPVTRKFAAQLADHKPHIRDEETKKPDSVSSEEPETIIIDVDESDKEGGDSNEPMFVQHTEAMLEEIEQMEKEIEMEDADKEEEPVIDIDACDKNNPLAAVEYIHDMHTFYKNFEKLSCVPPNYMDNQQDLNERMRGILIDWLIEVHYKFELMEETLYLTINVIDRFLAVHQIVRKKLQLVGVTALLLACKYEEVSVPVVDDLILISDKAYSRREVLDMEKLMANTLQFNFSLPTPYVFMKRFLKAAQSDKKLEILSFFMIELCLVEYEMLEYLPSKLAASAIYTAQCTLKGFEEWSKTCEFHTGYNEKQLLACARKMVAFHHKAGTGKLTGVHRKYNTSKFCHAARTEPAGFLI

SEQ ID NO: 7381 - DNA, 1176 bp, Carassius auratus
  CDS (1)..(1176)
atggcttcccgtggcttcgctcctttgtccggtcgtgaggagaacatcatggtcctgggaagagcggatggcctgcacgctctcaagcctggccagagggtcgtgctcggtgttctgaccgagaatgatcagcataatcgagtatttggacaggtttcgtccaaatatgtgccagctcttcgtgatgcatcgacccttgacgtcagcacatcgagtgctacgctaggtgttcacgtggtcgagccagtcattgcgcaggcaactaaaccgacctcattcttactgccctcagagcttctgctagtagatgatgtggtccaagatcttggttcagggtcttgcatggattcttccatgcagtcattgccggaggaggctgcttatgaggacatcctgtgtgttccagaatatgcggaggacatccacagatacctgcgtgaatgtgaagttaaatacaggccgaagcctggttacatgagaaagcagcctgacataaccaactgtatgagggtcatccttgttgactggctggttgaggttggtgaggaatacaaactgtgctcggagacccttttcttggctgtcaattacctggaccgcttcctttcgtgcatgtctgtcctgagaggaaaattgcagcttgtgggaacagctgctgtactcctggctgcgaaatatgaggaggtgtatcctccggaagtggatgagtttgtgtacatcacggatgacacctacacaaagaaacagctgcttcggatggagcagcacctgctccgtgtgctggcttttgacatgaccgctcccacggttcaccagtttttgatgcagtacacattggaggggcatatctgtgccaggactgtaaaccttgctttgtatctttcagagttgagcctgcttgaggtggatccctttgtgcagtatctaccttcaaagactgctgcagctgcatattgtctggccaactacactctaaatggggttttgtggcctgagaacctgtatgccttcactggttactcactggccgtgatcatcccatgtctgatggagcttcataaacttcatctaggggctgcaggtcgcccccaacaggctatccaggagaaatacaagggctcaaaatattgtggcgtgtccctgcttgagcctgtggagtctctgcccttcccttga

SEQ ID NO: 7382 - protein, 391 aa, Carassius auratus
MASRGFAPLSGREENIMVLGRADGLHALKPGQRVVLGVLTENDQHNRVFGQVSSKYVPALRDASTLDVSTSSATLGVHVVEPVIAQATKPTSFLLPSELLLVDDVVQDLGSGSCMDSSMQSLPEEAAYEDILCVPEYAEDIHRYLRECEVKYRPKPGYMRKQPDITNCMRVILVDWLVEVGEEYKLCSETLFLAVNYLDRFLSCMSVLRGKLQLVGTAAVLLAAKYEEVYPPEVDEFVYITDDTYTKKQLLRMEQHLLRVLAFDMTAPTVHQFLMQYTLEGHICARTVNLALYLSELSLLEVDPFVQYLPSKTAAAAYCLANYTLNGVLWPENLYAFTGYSLAVIIPCLMELHKLHLGAAGRPQQAIQEKYKGSKYCGVSLLEPVESLPFP

SEQ ID NO: 7383 - DNA, 1176 bp, Carassius auratus gibelio
  CDS (1)..(1176)
atggcttcccgtggcttcgctcctttgtccggtcgtcaggagaacctcatggtcctgggaagagcggatggcctgcacgctctcaagcctggccagagggtcgtgctcggtgttctgaccgagaatgatcagcataatcgagtatttggacaggtttcgtccaaatatgtgccagcctttcgtgatgcatcgactcttgacgtcagcacatcgagtgctacactgggtgttcacgtggtcgagccagtcattgcgcaggcaactaaaccgacctcattcttactgccttcagagcttctgctagtagatgatgtggtccaagatcttggttcagggtcttgcatggattcttccatgcagtcattgccggaagaggctgcttatgaggacatcctgtgtgttccagaatatgcggaggacatccacagatacctgcgtgaatgtgaagttaaatacaggccgaagcctggttacatgagaaagcagcctgacataaccaactgtatgagggtcatccttgttgactggctggttgaggttggtgaggaatacaaactgtgctcggagactcttttcttggctgtcaattacctggaccgcttcctttcgtgcatgtctgtcctgagaggaaaattgcagcttgtgggaacagctgctgtactcctggctgcaaaatatgaggaggtgtatcctccggaagtggatgagtttgtgtacatcacggatgacacctacacaaagaaacagctgcttcggatggagcagcacctgctccgtgtgctggcttttgacatgaccgctcccacggttcaccagtttttgatgcagtacacattggaggggcatatctgtgccaggactgtaaaccttgctttgtatctttcagagttgagcctgcttgaggtggatccctttgtgcagtatctaccttcaaagactgctgcagctgcatattgtctggccaactacactctaaatggggttttgtggcctgaaaacctgtatgccttcactggttactcactggccgtgatcatcccatgtctgatggagcttcataaacttcatctaggggctgcaggtcgcccccaacaggctatccaggagaaatacaagggctcaaaatattgtggcgtgtccctgcttgagcctgtggagtgtctgcctctcccttga

SEQ ID NO: 7384 - protein, 391 aa, Carassius auratus gibelio
MASRGFAPLSGRQENLMVLGRADGLHALKPGQRVVLGVLTENDQHNRVFGQVSSKYVPAFRDASTLDVSTSSATLGVHVVEPVIAQATKPTSFLLPSELLLVDDVVQDLGSGSCMDSSMQSLPEEAAYEDILCVPEYAEDIHRYLRECEVKYRPKPGYMRKQPDITNCMRVILVDWLVEVGEEYKLCSETLFLAVNYLDRFLSCMSVLRGKLQLVGTAAVLLAAKYEEVYPPEVDEFVYITDDTYTKKQLLRMEQHLLRVLAFDMTAPTVHQFLMQYTLEGHICARTVNLALYLSELSLLEVDPFVQYLPSKTAAAAYCLANYTLNGVLWPENLYAFTGYSLAVIIPCLMELHKLHLGAAGRPQQAIQEKYKGSKYCGVSLLEPVECLPLP

SEQ ID NO: 7385 - DNA, 1314 bp, Petunia hybrida
  CDS (1)..(1314)
atgaatactaacagagctgttcttgttcctcacagaggagaagtgggaggaaaacagaaaaatggacaagcagatggaagaaacaatcgacgtgtgcttggtgacattgggaaccttgtcactggtgctcctgttatagaaggaaagcctaaagctcagatttctcgtcctgctacgaggagcttttgtgcacagttgctggctaatgcacaagcagagaagaacaaggtgaaaccgcttgcagaagttgtcaataaggtaccagccaagaagaaggcatcagataagcctgctgtacaagaagctgttattgtcataagccctgatgaagaagttaagaagaagaccattgagaaaagtcccttgagcaaaagaaaagcaaagaagactggaaagactctcacttctaccctcactgcaagaagcaaggctgcttgtggactttccaataggcctaagaatgagattgatgatattgatgctgcagacgctgctaaccatttggctgttgtagagtatgttgaagacatctacaatttctataagctcactgaggacgaaagtcgagtgaataactacatggaattccaaccagagctgaatcataagatgagagccattcttgtggactggttgatagaagttcacaggaagtttgagctgatgcctgaaagcctttaccttactattaacatactagaccgttttctctctatgaagacggttcccaggaaggaacttcagttagttggcattagcgcaatgctaattgcttgcaagtatgaagagatttgggcaccagaggtcaatgatttcatgcatatatcagacaatgtgtataccagagatcatatacttcagatggagaaagcaattcttgggaagctggaatggtatctgacagttccaacaccatatgtgttcttggttaggtacatcaaagctgcaatgccatctgatgatcaggagatacagaacatggctttcttctttgctgaacttggtcttatgaactatacaactacaatatcatactgcccatcaatgctagcagcatctgctgtctatgctgctcgtggaactctcaacaaaggtcctctatggactccaactctgcagcaccatactggctactcagaagagcagttgatggaatgcacaaagcaattggttagctatcacaagggtgctgcagaaagtaagctcaaggcaatctacaggaagttctctagtccagatagaggtgctgttgccctcttcccaccagcaagaaatcttctaccaactactactactactactacctcctcttga

SEQ ID NO: 7386 - protein, 437 aa, Petunia hybrida
MNTNRAVLVPHRGEVGGKQKNGQADGRNNRRVLGDIGNLVTGAPVIEGKPKAQISRPATRSFCAQLLANAQAEKNKVKPLAEVVNKVPAKKKASDKPAVQEAVIVISPDEEVKKKTIEKSPLSKRKAKKTGKTLTSTLTARSKAACGLSNRPKNEIDDIDAADAANHLAVVEYVEDIYNFYKLTEDESRVNNYMEFQPELNHKMRAILVDWLIEVHRKFELMPESLYLTINILDRFLSMKTVPRKELQLVGISAMLIACKYEEIWAPEVNDFMHISDNVYTRDHILQMEKAILGKLEWYLTVPTPYVFLVRYIKAAMPSDDQEIQNMAFFFAELGLMNYTTTISYCPSMLAASAVYAARGTLNKGPLWTPTLQHHTGYSEEQLMECTKQLVSYHKGAAESKLKAIYRKFSSPDRGAVALFPPARNLLPTTTTTTTSS

SEQ ID NO: 7387 - DNA, 1257 bp, Arabidopsis thaliana
  CDS (1)..(1257)
atgattttgccaatgttagggggtttacgtggaggaaaggtaattccgacgaatggacagacaagaagggcactgagtaatataaacaagaacatcatcggagctccggtctatccttgtgctgtcaagagaccattcactgagaaaaatgggatttgtaacaagaagattccacctgttccagtgcatcgaccagttactaggaaatttgctgctcaattagctgagaacaatctccaaatccacaaggaggaaaccaagaaaccagacttgatttcaaacgaagcattagatagaatcataacagatgtggaagaaggagactttaatgaaccaatgtttgttcaacatactgaagcaatgcttgaagagattgacaaaatggaagggattgaaatgcaagattcaaatgatattgatgctgaagtagaagagtctgtgatggatatagacagctgtgacaagaacaatcctttatctgtagttgaatacattaatgacatatattgcttctacaagaaaaatgagtgtcgtagctgtgtcccgcctaactacatggagaatcaacatgacattaacgagaggatgagaggaatcctttttgattggttgattgaggtacattacaagtttgagctgatggaggagacgctttacctgacaatcaatctcattgacagatttcttgcggttcatcaacatatcgcgaggaaaaagcttcagcttgtgggtgtaacagctatgttacttgcttgcaaatatgaagaagtttcagttccagttgttgatgatctaatcctgatctctgacaaggcttatactaggacagagattcttgatatggagaagttaatggcgaataccttgcaattcaatttctgtctgccaactccatatgtgttcatgagacggtttctcaaagctgcacaatctgacaaaaagcttgagcttttatcattcttcatgatcgagctttgtttagtggagtacgagatgcttcagtacactccttctcagttggctgcatcggcgatctacactgctcagagcacacttaaaggatacgaggattggagcaaaaccagtgagttccactcaggctacaccgaagaagcgcttctggaatgttcgagaaagatggttggtttgcatcacaaggcagggacagggaagctaacaggtgttcacaggaaatacaacacatccaaatttggttatgctgcaagaattgaaccagctgggtttcttctgctgtga

SEQ ID NO: 7388 - protein, 418 aa, Arabidopsis thaliana
MILPMLGGLRGGKVIPTNGQTRRALSNINKNIIGAPVYPCAVKRPFTEKNGICNKKIPPVPVHRPVTRKFAAQLAENNLQIHKEETKKPDLISNEALDRIITDVEEGDFNEPMFVQHTEAMLEEIDKMEGIEMQDSNDIDAEVEESVMDIDSCDKNNPLSVVEYINDIYCFYKKNECRSCVPPNYMENQHDINERMRGILFDWLIEVHYKFELMEETLYLTINLIDRFLAVHQHIARKKLQLVGVTAMLLACKYEEVSVPVVDDLILISDKAYTRTEILDMEKLMANTLQFNFCLPTPYVFMRRFLKAAQSDKKLELLSFFMIELCLVEYEMLQYTPSQLAASAIYTAQSTLKGYEDWSKTSEFHSGYTEEALLECSRKMVGLHHKAGTGKLTGVHRKYNTSKFGYAARIEPAGFLLL

SEQ ID NO: 7389 - DNA, 1263 bp, Oryza sativa
  CDS (1)..(1263)
atggatagggcgagcgagaaccggaggctggcggcggtggggaagcccgtgccggggatcggagagatggggaaccggaggccgctcagggacatcaacaacctcgtcggggcgccgtcgcacccgtccgcgatcgccaagaagccgatgctagagaagagtgggaaggaagagcagaagcctgcattggtggtgagccaccggcctatgttgaggaatttcgcggcctccttgacgcgaaaagaacagcttgaccatcaggtttccgtggctgatgcagcggtcgtctgcactgatccacagaagaaccccatccccgatggcacagttgacgacgatgtggaatcgtgcgaatcgaacgactatattgccgtggatgaatgcaatgatactgatgaggatgagtccatgatggacattgacagtgccgactcagggaatccgcttgcagcaaccgagtacgtcgaagagttgtacaagttctatagagaaaatgaggaaatgagttgtgtgcagcctgattacatgtccagtcaaggagacataaatgaaaagatgagagcaattctgattgattggctcattgaggtccatcacaagtttgagctgatggatgagactctctttcttactgttaacatagtagacagattcttggaaaaacaagttgtgccaaggaagaagttgcagctagttggagtgacagctatgctccttgcttgcaaatatgaggaagtcgcagtccctgtcgtcgaggatctagtgctaatttctgaccgggcttatacaaaaggacaaattctggaaatggaaaagttgatcctaaacacactccagttcaacatgtctgtaccaacaccttacgtttttatgagacggtttctgaaggcagctcagtctgacaagcagctacagctactttcctttttcattctggagctctccctggtggaataccaaatgctcaagtaccgaccttcgcttctttctgctgctgcagtttacacagcacaatgtgctctcactcgttgccagcagtggacaaagacctgcgaactacatagtagatataccggagagcagcttcttgagtgttctaggatgatggtagatttccaccagaaggcgggagcaggcaagctcaccggcgtgcaccggaaatacagtacgttcaagtttgggtgtgcagccaaaacggagcctgctctcttcttgcttgagtcaggagcaggaggttacaaccttcagaagcagccttgttga

SEQ ID NO: 7390 - protein, 420 aa, Oryza sativa
MDRASENRRLAAVGKPVPGIGEMGNRRPLRDINNLVGAPSHPSAIAKKPMLEKSGKEEQKPALVVSHRPMLRNFAASLTRKEQLDHQVSVADAAVVCTDPQKNPIPDGTVDDDVESCESNDYIAVDECNDTDEDESMMDIDSADSGNPLAATEYVEELYKFYRENEEMSCVQPDYMSSQGDINEKMRAILIDWLIEVHHKFELMDETLFLTVNIVDRFLEKQVVPRKKLQLVGVTAMLLACKYEEVAVPVVEDLVLISDRAYTKGQILEMEKLILNTLQFNMSVPTPYVFMRRFLKAAQSDKQLQLLSFFILELSLVEYQMLKYRPSLLSAAAVYTAQCALTRCQQWTKTCELHSRYTGEQLLECSRMMVDFHQKAGAGKLTGVHRKYSTFKFGCAAKTEPALFLLESGAGGYNLQKQPC

SEQ ID NO: 7391 - DNA, 1380 bp, Pneumocystis carinii
  CDS (1)..(1380)
atgaacgcagcgaggcgtgtaacacgtcagacggcaacgtttaatcttaatgatgagaacaaattgcatggacaaatatctcgggtgaagcaagtatctacacaaggattagaaggggtaaataagccatggacggcggcgacgcgaaagagagcagcattaggagatgtaagcaatgtgcataataaggagaatcagacggcgaaaacgaaaacgcagccgttatcaaccaaagcacgcgtggtgacgaaaaccggagttcaaagtcatcaaagcaaagaatccgttcatacggtaccaacgggagaattgcgtggtgaagaaacaacacgaaaaagacggacatcaaaggttttaacggagcaaaaagtgatcattgaggtggaacaaacacaagcaagtaaaaaagtgagaaccgatggccttttaaacggatcggtacaagagcatccagcatcacaagattgggatgatttagatgcggatgatgctcatgatccattgatggtatcggaatacgttgaagaaatcatgggttacatgagggaattagaggtattaacacttcctttaccagattatatggatcgacagaaagaacttcaatggaaaatgcgaggaatcttggtagattggttaattgaggttcatgcgaaatttcgtcttcttccagaaacgttatttctttctgtcaatattattgatcgatttttatccctacgagtatgttcgcttcctaagcttcaattagtagggattacagcactttttatcgcagcaaaatatgaagaagtgatgtgtccatcgatacaaaattttatgtacatggcagatggtggatatacgaatgaagaaattctaaaagcagaacaatacgttttacaagttcttggatatgatatgtcatatccaaatcccattaattttctaagaagagtatcaaaggcagataattatgatattcagacacgtacagtggcaaaatatcttatggaaattagtcttcttgatcatcgatttttgccttttgtgccatctaatattgcagcttcgggcatttatttggctagaattatggttactggtggcaattggaatgctaatttaatacattattcgggatataaagaatcagatcttgttccatgttctaaaatgatgctggattatctttcacgatcagttataaaacatgaagcattttttaaaaaatatgccagcaaaaaattcatgaaagctagtttatttgttcgcgattgggttaaaaaacattacgatcttgaggcaaacgtgcgattaaacactatctctttcgattacgataaccatgaatcaaatgaaatacatcaggacttagaagaggaagaaggatccctatag

SEQ ID NO: 7392 - protein, 459 aa, Pneumocystis carinii
MNAARRVTRQTATFNLNDENKLHGQISRVKQVSTQGLEGVNKPWTAATRKRAALGDVSNVHNKENQTAKTKTQPLSTKARVVTKTGVQSHQSKESVHTVPTGELRGEETTRKRRTSKVLTEQKVIIEVEQTQASKKVRTDGLLNGSVQEHPASQDWDDLDADDAHDPLMVSEYVEEIMGYMRELEVLTLPLPDYMDRQKELQWKMRGILVDWLIEVHAKFRLLPETLFLSVNIIDRFLSLRVCSLPKLQLVGITALFIAAKYEEVMCPSIQNFMYMADGGYTNEEILKAEQYVLQVLGYDMSYPNPINFLRRVSKADNYDIQTRTVAKYLMEISLLDHRFLPFVPSNIAASGIYLARIMVTGGNWNANLIHYSGYKESDLVPCSKMMLDYLSRSVIKHEAFFKKYASKKFMKASLFVRDWVKKHYDLEANVRLNTISFDYDNHESNEIHQDLEEEEGSL

SEQ ID NO: 7393 - DNA, 1305 bp, Lycopersicon esculentum
  CDS (1)..(1305)
atggcaatcactgatgagaacaaacatcccttgattaaggaatcttctgttcgagtgaaagatagggctgaaatggctaccagaaaggttgttggagtggaaacaagaagcaaccgaagggttttgggcgcgattaatcagaatctagtgggtggtcaggggtatccttgtgttgttaacaagagaggattatctgatggaaatggattctgtgacaagaatcttcctgttcatggtcatcgaccaatcacgaggaaatatgcagcacaaattgctagctcccagaaacacagctcagaggaaaacaagaaacctaagatagcagctgaaagtttcagcgtctgggaggatgatatggaggcagctaatgataagcctgtccctatgtctttggagcaaacagaaaaagtgtcaaagggcaaggatcaaatgacatacattcaggaggttgaaatggaggatatctttgaggaggctgtaatagatatcgacggtgatgatgcaaagaaccatcttgcagctgttgaatatgtgggagatttgtttgctaactacagaacaatggaggttaatagctgtgcttctccatactatatggcacaacaggctgacatcaatgagagaatgcggtctatcttgattgactggctaattgaggtgcatcacaagtttgagctcagggaagagacgttgttcctgaccgtcaatttgattgaccggttcttggagaagcaaggcattgtcagaaagaagctccagcttgttggattggttgcaatgctactagcatgcaagtatgaggaggtttgtgctccactggtggaggatctggtgttgatttcggacaaagcctatacaaggaaggaggttcttgaaatggaaagcatgatgctcaacacactgcagtttaatatgtctgtcccaactgcatacgtttttatgcgaagatatctcaaggctgctcaatgtgacaggaagcttgagctgctgtccttcatgttggttgagctttgccttgtggagtatgaaatgctcaaatttccaccatccttcatagctgctgcagcaatctatacagctcagaccacactctacggtgtccagcagtggagcaagacgtgcgaggtgcacacaacgtactcagaagatcaacttctggagtgctcgagatcaattgttggctaccaccagaaggcagcaacagggaaactaacaggggtacataggaaatacagcatatcgaaatttgggtatgcagccaagtgtgagcctgcccattttcttgtgcagcagacacaagaatag

SEQ ID NO: 7394 - protein, 434 aa, Lycopersicon esculentum
MAITDENKHPLIKESSVRVKDRAEMATRKVVGVETRSNRRVLGAINQNLVGGQGYPCVVNKRGLSDGNGFCDKNLPVHGHRPITRKYAAQIASSQKHSSEENKKPKIAAESFSVWEDDMEAANDKPVPMSLEQTEKVSKGKDQMTYIQEVEMEDIFEEAVIDIDGDDAKNHLAAVEYVGDLFANYRTMEVNSCASPYYMAQQADINERMRSILIDWLIEVHHKFELREETLFLTVNLIDRFLEKQGIVRKKLQLVGLVAMLLACKYEEVCAPLVEDLVLISDKAYTRKEVLEMESMMLNTLQFNMSVPTAYVFMRRYLKAAQCDRKLELLSFMLVELCLVEYEMLKFPPSFIAAAAIYTAQTTLYGVQQWSKTCEVHTTYSEDQLLECSRSIVGYHQKAATGKLTGVHRKYSISKFGYAAKCEPAHFLVQQTQE

SEQ ID NO: 7395 - DNA, 1422 bp, Antirrhinum majus
  CDS (1)..(1422)
atgggttcaagaaatattgttcaacagcaaaacagagcggaggcagcagtccctggtgctatgaagcagaagaacatagcaggggagaagaagaatcgacgcgcacttggcgatatagggaatctcgttacggttcgtggggtagatggcaaggccaaggcaattcctcaggtttctcgaccagttactaggagtttttgtgctcaattacttgcaaatgcacagacagcagcagcagacaacaacaagattaatgccaagggtgccattgtagtagatggagttctgcctgatagacgagtggcggcggcacgtgtgccagcacagaaaaaggccgctgttgtcaaacctaggccagaagagataattgtaattagtcctgattctgttgcagagaagaaggagaagcctattgagaaggaaaaggctgctgaaaagtcggcgaaaaagaaagctcctactcttacttcaacactcactgccagaagcaaggctgctagtggggtgaaaactaaaacaaaggagcagatagtggacattgatgctgctgatgttaacaatgatctggctgttgtcgaatacgttgaggacatgtacaagttttacaagtctgttgagaatgagagcaggcctcatgattatatgggttcacaacctgagataaatgagaaaatgcgcgcaattctgatcgattggttggttcaagttcaccacaaatttgaactttcaccagagaccctttacctgaccatcaacattgttgatcgataccttgcttccgagactacgataagaagagaactgcagttggtgggcataggtgccatgcttatagcctccaaatatgaagaaatctgggccccagaggttcacgagttagtttgcatctcggacaacacttactctgataagcaaatcttggttatggagaagaaaatactaggcgcattggagtggtacttgacagttccaaccccttacgtattcctcgtgcgcttcataaaagcttctatgaccgactcagatgtagagaacatggtctatttcttggctgagcttggaatgatgaattacgccacgcttatatactgcccctcgatgattgctgctgcatcagtatatgcagccaggtgtaccttaaacaaggcacctttttggaacgaaacgcttcaattgcacactggtttctcagagccacagctaatggattgcgctaagttgctggtagcgttccctaaaatggctggagatcagaaactgaagagcatttacagaaaatactcgaatttggagcgaggggcggttgcactcttgtcaccagccaaatctgttttcgtctttctcattgagctactaatgaatgcaatagagaaaatccagtgttctctattctttacatcagagatttggtgtaggttctaa

SEQ ID NO: 7396 - protein, 473 aa, Antirrhinum majus
MGSRNIVQQQNRAEAAVPGAMKQKNIAGEKKNRRALGDIGNLVTVRGVDGKAKAIPQVSRPVTRSFCAQLLANAQTAAADNNKINAKGAIVVDGVLPDRRVAAARVPAQKKAAVVKPRPEEIIVISPDSVAEKKEKPIEKEKAAEKSAKKKAPTLTSTLTARSKAASGVKTKTKEQIVDIDAADVNNDLAVVEYVEDMYKFYKSVENESRPHDYMGSQPEINEKMRAILIDWLVQVHHKFELSPETLYLTINIVDRYLASETTIRRELQLVGIGAMLIASKYEEIWAPEVHELVCISDNTYSDKQILVMEKKILGALEWYLTVPTPYVFLVRFIKASMTDSDVENMVYFLAELGMMNYATLIYCPSMIAAASVYAARCTLNKAPFWNETLQLHTGFSEPQLMDCAKLLVAFPKMAGDQKLKSIYRKYSNLERGAVALLSPAKSVFVFLIELLMNAIEKIQCSLFFTSEIWCRF

SEQ ID NO: 7397 - DNA, 1326 bp, Antirrhinum majus
  CDS (1)..(1326)
atgggttcaagacaccaggtggtccaacagcagaacagaggagatgtagttcctggagctattaagcagaagagtatggcagtcgagaaaaagaatcgtcgtgcactaggcgacatagggaacgtcgttacagttcgtggggtcgaaggcaaggcacttcctcaagtttctcgacccattactaggggcttttgtgctcagttaattgctaatgcagaggctgcagcagctgaaaacaacaagaattccttggctgtcaatgctaagggagccgatggagctttaccgattaaacgggccgtggctcgtgtgccggtgcagaaaaaaactgtcaaatctaagccacaagagataattgaaatcagccctgatactgagaagaagaaagctccagttcttgagaaggaaattacaggagagaagtctttgaaaaagaaggctccaactctaacttcgaccctcactgcaaggagcaaggctgctagtgtggtgagaactaagcctaaggagcagatagttgacattgatgccgcagatgtgaataacgatttagctgttgttgaatacgtcgaagacatgtacaagttttacaagtcagctgagaatgacagcagaccgcatgattatatggactcacaacccgagataaatgagaaaatgagagccattctcatagattggttagttcaagttcactacaaattcgaactttctccagagaccctttaccttaccatcaacatcgttgatcgataccttgcatcgaagactacatcaagacgggagctgcaattgttgggcatgagttccatgcttatcgcgtccaagtacgaagaaatttgggcgcctgaggtaaatgacttagtttgcatctcggatggaagctactccaacgagcaagtcttgcgtatggagaagaaaattcttggtgcgttggaatggtacttaactgttccgactccatacgtgtttcttgtacgattcataaaagcctctcttccggattcagatgtggaaaagaacatggtttattttctggcagagctaggaatgatgaattatgcaactattattatgtactgtccctcaatgattgctgcagcggctgtgtacgcagcgcggtgcacgttgaataagatgccaatctggaacgaaacactgagaatgcacacgggtttctcagaagtgcagcttatggattgtgcgaagctgttgattgattttcatggagggtcgaccgatcagaagttgcaagggatttataggaaatactcgcgtttagagaaaggggctgttgcactcttgccacagccactgctggcatga

SEQ ID NO: 7398 - protein, 441 aa, Antirrhinum majus
MGSRHQVVQQQNRGDVVPGAIKQKSMAVEKKNRRALGDIGNVVTVRGVEGKALPQVSRPITRGFCAQLIANAEAAAAENNKNSLAVNAKGADGALPIKRAVARVPVQKKTVKSKPQEIIEISPDTEKKKAPVLEKEITGEKSLKKKAPTLTSTLTARSKAASVVRTKPKEQIVDIDAADVNNDLAVVEYVEDMYKFYKSAENDSRPHDYMDSQPEINEKMRAILIDWLVQVHYKFELSPETLYLTINIVDRYLASKTTSRRELQLLGMSSMLIASKYEEIWAPEVNDLVCISDGSYSNEQVLRMEKKILGALEWYLTVPTPYVFLVRFIKASLPDSDVEKNMVYFLAELGMMNYATIIMYCPSMIAAAAVYAARCTLNKMPIWNETLRMHTGFSEVQLMDCAKLLIDFHGGSTDQKLQGIYRKYSRLEKGAVALLPQPLLA

SEQ ID NO: 7399 - DNA, 1176 bp, Carassius auratus
  CDS (1)..(1176)
atggcttcccgtggcttcgctcctttgtccggtcgtcaggagaacatcatggtcctgggaagagcggatggcctgcacgctctcaagcctggccagagggtcgtgctcggtgttctgaccgagaatgatcagcataatcgagtatttggacaggtttcgtccaaatatgtgccagcccttcgtgatgcatcgacccttgacgtcagcacatcgagtgctacactgggtgttcacgtggtcgagccagtcattgcgcaggcaactaaaccgacctcattcttactgccctcagagcttctgctagtagatgatgtggtccaagatcttggttcagggtcttgcatggattcttccatgcagtcattgccggaggaggctgcttatgaggacatcctgtgtgttccagaatatgcggaggacatccacagatacctgcgtgaatgtgaagttaaatacaggccgaagcctggttacatgagaaagcagcctgacataaccaactgtatgagggtcatccttgttgactggctggttgaggttggtgaggaatacaaactgtgctcggagacccttttcttggctgtcaattacctggaccgcttcctttcgtgcatgtctgtcctgagaggaaaattgcagcttgtgggaacagctgctgtactcctggctgcgaaatatgaggaggtgtatcctccggaagtggatgagtttgtgtacatcacggatgacacctacacaaagaaacagctgcttcggatggagcagcacctgctccgtgtgctggcttttgacatgaccgctcccacggttcaccagtttttgatgcagtacacattggaggggcatatctgtgccaggactgtaaaccttgctttgtatctttcagagttgagcctgcttgaggtggatccctttgtgcagtatctaccttcaaagactgctgcagctgcatattgtctggccaactacactctaaatggggttttgtggcctgaaaacctgtatgccttcactggttactcactggccgtgatcatcccatgtctgatggagcttcataaacttcatctaggggctgcaggtcgcccccaacaggctatccaggagaaatacaagggctcaaaatattgtggcgtgtccctgcttgagcctgtggagtctctgcctctcccttga

SEQ ID NO: 7400 - protein, 391 aa, Carassius auratus
MASRGFAPLSGRQENIMVLGRADGLHALKPGQRVVLGVLTENDQHNRVFGQVSSKYVPALRDASTLDVSTSSATLGVHVVEPVIAQATKPTSFLLPSELLLVDDVVQDLGSGSCMDSSMQSLPEEAAYEDILCVPEYAEDIHRYLRECEVKYRPKPGYMRKQPDITNCMRVILVDWLVEVGEEYKLCSETLFLAVNYLDRFLSCMSVLRGKLQLVGTAAVLLAAKYEEVYPPEVDEFVYITDDTYTKKQLLRMEQHLLRVLAFDMTAPTVHQFLMQYTLEGHICARTVNLALYLSELSLLEVDPFVQYLPSKTAAAAYCLANYTLNGVLWPENLYAFTGYSLAVIIPCLMELHKLHLGAAGRPQQAIQEKYKGSKYCGVSLLEPVESLPLP

SEQ ID NO: 7401 - DNA, 1398 bp, Homo sapiens
  CDS (1)..(1398)
atggagaccggctttcccgcaatcatgtaccctggatcttttattgggggctggggagaagagtatctcagctgggaaggaccggggctcccagatttcgtcttccagcagcagcccgtggagtctgaagcaatgcactgcagcaaccccaagagtggagttgtgctggctacagtggcccgaggtcccgatgcttgtcagatactcaccagagccccgctgggccaggatcccccgcagaggacagtgctagggctgctaactgcaaatgggcagtacaggaggacctgtggccaggggatcacaagaatcaggtgttattctggatcagaaaatgccttccctccagctggaaagaaagcactccctgactgtggggtccaagagccccccaagcaagggtttgacatctacatggatgaactagagcagggggacagagacagctgctcggtcagagaggggatggcatttgaggatgtgtatgaagtagacaccggcacactcaagtcagacctgcacttcctgctggatttcaacacagtttcccctatgctggtagattcatctctcctctcccagtctgaagatatatccagtcttggcacagatgtgataaatgtgactgaatatgctgaagaaatttatcagtaccttagggaagctgaaataaggcacagacccaaagcacactacatgaagaagcagccagacatcacggaaggcatgcgcacgattctggtggactggctggtggaggttggggaagaatataaacttcgagcagagaccctgtatctggctgtcaacttcctggacaggttcctttcatgtatgtctgttctgagagggaaactgcagctcgtaggaacagcagctatgcttttggcttcgaaatatgaagagatatatcctcctgaagtagacgagtttgtctatatcaccgatgatacatacacaaaacgacaactgttaaaaatggaacacttgcttctgaaagttctagcttttgatctgacagtaccaaccaccaaccagtttctccttcagtacttgaggcgacaaggagtgtgcgtcaggactgagaacctggctaagtacgtagcagagctgagtctacttgaagcagatccattcttgaaatatcttccttcactgatagctgcagcagctttttgcctggcaaactatactgtgaacaagcacttttggccagaaacccttgctgcatttacagggtattcattaagtgaaattgtgccttgcctgagtgagcttcataaagcgtaccttgatataccccatcgacctcagcaagcaattagggagaagtacaaggcttcaaagtacctgtgtgtgtccctcatggagccacctgcagttcttcttctacaataa

SEQ ID NO: 7402 - protein, 465 aa, Homo sapiens
METGFPAIMYPGSFIGGWGEEYLSWEGPGLPDFVFQQQPVESEAMHCSNPKSGVVLATVARGPDACQILTRAPLGQDPPQRTVLGLLTANGQYRRTCGQGITRIRCYSGSENAFPPAGKKALPDCGVQEPPKQGFDIYMDELEQGDRDSCSVREGMAFEDVYEVDTGTLKSDLHFLLDFNTVSPMLVDSSLLSQSEDISSLGTDVINVTEYAEEIYQYLREAEIRHRPKAHYMKKQPDITEGMRTILVDWLVEVGEEYKLRAETLYLAVNFLDRFLSCMSVLRGKLQLVGTAAMLLASKYEEIYPPEVDEFVYITDDTYTKRQLLKMEHLLLKVLAFDLTVPTTNQFLLQYLRRQGVCVRTENLAKYVAELSLLEADPFLKYLPSLIAAAAFCLANYTVNKHFWPETLAAFTGYSLSEIVPCLSELHKAYLDIPHRPQQAIREKYKASKYLCVSLMEPPAVLLLQ

SEQ ID NO: 7403 - DNA, 1266 bp, Mus musculus
  CDS (1)..(1266)
atgcatcgccagagctccaagagtggagtcgctctgcctccagtgggccaaggtcctgatgcttgtcaaatgctcagcagagctcagcttggccaggatcccccacagagaaccgtgctaggggtgttgactgaaaatgagcagtacaggaggacctgtggccaggagatcacagcaatccgatgtttttctggatcagaaaatgtcttccctgcggctggaaagaaagtgctctctgaccatggggtcaatgaaccagccaaacgtgggtttgatatctatatggatgatcctgaacagggggacagagatacctgctcggggaaagagggcatcatatttgaggatgtgtatgaagtcgacaccagcatgctcaagtcagatctccacttcctgctggatttcaacacagtttccccaatgctggttgaccccaccacccatgcccagtcagaggaagcaacggattttggttcagatgtgattaacgtaacggagtatgcagaggagattcatcgctaccttccagaagctgaagtaagacacagacccaaggctcactacatgaggaagcagccggacatcacggagggcatgcgcgccatcctggtggactggctggtggaggttggggaagaatataaacttcgcacagagaccctgtacttggctgtcaacttcctggacaggtttctctcctgcatgtctgttctgagagggaaattgcagcttgtcgggacagcagctattctcctggcttcgaaatatgaagagatatatccgcccgacgtggatgagtttgtctacatcaccgacgatacgtacacgaagcgacagctactgaggatggagcatctgctactcaaagtcctggcatttgatctgaccgttccaaccaccaaccagttcctccttcagtacctaaggcgtcaaggagtgtgcatcaggactgagaatttggccaagtatgttgcagaactgagccttctggaagctgacccgttcttgaagtatcttccttccttggttgctgcagcagcttactgcctggcaaactatattgtgaacagacacttctggccagaaacacttgctgcatttacgggctattcattaaatgagattgtgccttgcctgagtgagctgcataaagcatgcctcagtatcccccatcgaccgcagcaagcaatcagggagaagtacaaggcttcgaagtacctgcacgtgtccctcatggagccgcctgtagttcttcccctgcagtga

SEQ ID NO: 7404 - protein, 421 aa, Mus musculus
MHRQSSKSGVALPPVGQGPDACQMLSRAQLGQDPPQRTVLGVLTENEQYRRTCGQEITAIRCFSGSENVFPAAGKKVLSDHGVNEPAKRGFDIYMDDPEQGDRDTCSGKEGIIFEDVYEVDTSMLKSDLHFLLDFNTVSPMLVDPTTHAQSEEATDFGSDVINVTEYAEEIHRYLPEAEVRHRPKAHYMRKQPDITEGMRAILVDWLVEVGEEYKLRTETLYLAVNFLDRFLSCMSVLRGKLQLVGTAAILLASKYEEIYPPDVDEFVYITDDTYTKRQLLRMEHLLLKVLAFDLTVPTTNQFLLQYLRRQGVCIRTENLAKYVAELSLLEADPFLKYLPSLVAAAAYCLANYIVNRHFWPETLAAFTGYSLNEIVPCLSELHKACLSIPHRPQQAIREKYKASKYLHVSLMEPPVVLPLQ

SEQ ID NO: 7405 - DNA, 1257 bp, Xenopus laevis
  CDS (1)..(1257)
atgcggcgcagtatggcttccaatgggcacatccttacagcatcctctgtggtgggagccagcagtgcattccagaatccatgcctagccaaggtagaagtccagcctaacctgcctcaaagaactgtgttgggtgttatcggtgacaatgaacagcgcagaagatcagttagtcggggtggtgtccctgcaaagagtctacctggaattgaaaatgttcttgctttccctggaaaaatcctgtctgcaaacccagcgcctgttgctccaaagccaagttttacagtctatgtggatgagccaacagaaacctattcagttgaaatagattgtcccagtttgggtgatgaggattcaaatattgtcaagcagaacattcacctgctcctagatatcagtgaagcttctccgatggtggttgacacgtcaccccagacaagcccagaggatgactctgtaacagaccctgatgctgtagctgtgtctgaatatatacatgaaattcaccagtaccttcgagaggctgagttgaaacacagaccaaaagcatattacatgcgtaagcagccagacattacttcagcaatgcgcacgatacttgtggactggctagtagaagttggtgaggaatacaagctgcacacggagactctttatctggctatgaattatttggaccgcttcctatcatgcatgtctgtactccggggaaaactgcagcttgtaggcacagcagctattttattggcatcaaaatatgaagaaatctaccctcctgatgttgatgaatttgtgtacataactgatgatacatactcaaagaaacagcttctgcgcatggagcacgttctgttgaaggttctggcctttgaccttactgtacctacagtcaaccaattcttgctacagtatctgcagagacatgcagtcagtgtgaagatggagcaccttgcaatgtacatggcagaactaactctgcttgaagtggagccattcttgaagtacgttccttcacttacagctgctgcagcctattgtcttgccaattatgcactcaacaaagtgttctggcctgacacactggaagcctttactggctacgcactgagtgacatagcaccttgccttagtgatttgcaccaattctgtcttggtgccccttatcaggctcagcaagcaataagggaaaagtacaagaccaccaagtatatgcaagtgtctcttctggagatgccgtcaatacttcccctcaactga

SEQ ID NO: 7406 - protein, 418 aa, Xenopus laevis
MRRSMASNGHILTASSVVGASSAFQNPCLAKVEVQPNLPQRTVLGVIGDNEQRRRSVSRGGVPAKSLPGIENVLAFPGKILSANPAPVAPKPSFTVYVDEPTETYSVEIDCPSLGDEDSNIVKQNIHLLLDISEASPMVVDTSPQTSPEDDSVTDPDAVAVSEYIHEIHQYLREAELKHRPKAYYMRKQPDITSAMRTILVDWLVEVGEEYKLHTETLYLAMNYLDRFLSCMSVLRGKLQLVGTAAILLASKYEEIYPPDVDEFVYITDDTYSKKQLLRMEHVLLKVLAFDLTVPTVNQFLLQYLQRHAVSVKMEHLAMYMAELTLLEVEPFLKYVPSLTAAAAYCLANYALNKVFWPDTLEAFTGYALSDIAPCLSDLHQFCLGAPYQAQQAIREKYKTTKYMQVSLLEMPSILPLN

SEQ ID NO: 7407 - DNA, 1281 bp, Patella vulgata
  CDS (1)..(1281)
atgtctatggttcacgggagttcgtttcaaattgcacaggacggtgaaaatgagaatcaaggtgttcaaagagtgaaaaaagctggattgactgcccgtggaaatgtagcagttgccaaacgatcagcactgggaacaataacgaaccaaaatattagagtacaaccatcaagggccgcaaagtcgggtaatgcagattgccaggatgaaaatgtttttgcaaaacagaagtcttttggatctagtaacaatgaaaacaaaggatttaaaattcatgttgatgaaccaacagtacaggtactcacaactgctacattgaaaactacaagacaaagtgaagacgaagacataaaattaaatgaccaagtgacatctttaccatctttacaagcattagaagacatccaagtagacaatgagaatggctcgcccatggtattggatgttactattgaagatgcagaaaagaaacccattgatagagaagctattatcctttcagttccagaatatgcagaagatatttataagcatctaagagaagcagagtcgagacaccgttctaagcccggctacatgaagaaacaaccagatataacaaattctatgagaagtattttggttgactggatggttgaagtttcggaagaatataaattacatcgagaaacccttttcctagctataaattatattgacagattcctctcacaaatgtctgtattaagaggcaaattacaacttgttggagcagctagtatgtttattgcatcgaaatatgaagaaatttacccaccagaggtttccgagtttgtatacattactgatgatacctatgaacagaaacaagtcctccgtatggaacatttaatattgaaggtcttgtcatttgatgtagctcaacctacgataaactggtttaccgatacctacgcaaaaatggctgatactgatgaaacaacgaaatctttatctatgtatttatctgaactaacattagtggatgccgacccttatttaaaatatttacccagtacaattgcagcagcatctttatgtttagcaaatatcacattaggcagtgaaccatggccttcaagtttagccaaagaatcaaagtatgaaattagtgaattttctgaatgtttacaagaaatgtatcagacatatttaaatgcaccaaatcatccacaacaagccattagagaaaaatacaagtcatcaaaatatcaacaggtatcatctatcagtcctccctccagtttgtccttcaccatgtag

SEQ ID NO: 7408 - protein, 426 aa, Patella vulgata
MSMVHGSSFQIAQDGENENQGVQRVKKAGLTARGNVAVAKRSALGTITNQNIRVQPSRAAKSGNADCQDENVFAKQKSFGSSNNENKGFKIHVDEPTVQVLTTATLKTTRQSEDEDIKLNDQVTSLPSLQALEDIQVDNENGSPMVLDVTIEDAEKKPIDREAIILSVPEYAEDIYKHLREAESRHRSKPGYMKKQPDITNSMRSILVDWMVEVSEEYKLHRETLFLAINYIDRFLSQMSVLRGKLQLVGAASMFIASKYEEIYPPEVSEFVYITDDTYEQKQVLRMEHLILKVLSFDVAQPTINWFTDTYAKMADTDETTKSLSMYLSELTLVDADPYLKYLPSTIAAASLCLANITLGSEPWPSSLAKESKYEISEFSECLQEMYQTYLNAPNHPQQAIREKYKSSKYQQVSSISPPSSLSFTM

SEQ ID NO: 7409 - DNA, 1212 bp, Anguilla japonica
  CDS (1)..(1212)
atggctcttcgtttgacccggaattctcagcttgctgctgaaaaccgaacatcgctggcgggcaaaggcatggcggccaagcctgcgctaagacccagggccgtgctgggggagatcggaaacaaaaccgcagctccgagacccctccttaaaaaggaaactaagcccgagataacgaaagtcgttcagaggaagccaattaaagtggagaaggcccctgaggtgcagctccccaaacgaaatgcagctaagaaacttgaagagaaagtaacgttaccggtggtccctgagcctgcatctcccacacccatggagacctcgggctgtgcttcggatgatctgtgccaggccttctctgatgtgctccttaatatcaaggatgtggacgctgatgattatgacaaccccatgctctgcagtgaatatatcaaggatatctacaaatacctccgtcagcttgaggttgaccaggcagtcagaccgaaatacttggagggacaggaagtgactgggaatatgcgtgccatccttattgactggctggtccaggtgcaagtcaagtttcgcttgctgcaggagactatgtatatgactgtaggaatcattgaccgtttccttcaggataaccctgtgcccaaaaagcagctccagcttgttggtgttactgctatgttccttgcctccaaatacgaagagatgtacccaccagagattgccgacttcgcatttgtcactgaccgagcctacaccactgcccagatcagagacatggagatgaagatcctgagggtactgaattttagctttggtcgacctctccccctccagttcctgcgccgtgcttcaaagataggagaggtcacagccgaacatcacaccctggcaaagtacttcatggagctcacaatggtggactatgaaatggtccacttccctccctccctggtggcctctgctgcctttgcgctctctctgaaggtttttgattgtggtgaatggactcctactctgcagtactacatggattacaccgaggcctgcctgatccccgtgatgcagcacattgccaagaatgttgtgaaggtcaatgaaggacacacaaagcacatggcagtcaagaataagtatggtagccagaagcagatgaggatcagccatcttccacagctgaagtcttctgttatcaaggacctggcaaaacaattgtcttaa

SEQ ID NO: 7410 - protein, 403 aa, Anguilla japonica
MALRLTRNSQLAAENRTSLAGKGMAAKPALRPRAVLGEIGNKTAAPRPLLKKETKPEITKVVQRKPIKVEKAPEVQLPKRNAAKKLEEKVTLPVVPEPASPTPMETSGCASDDLCQAFSDVLLNIKDVDADDYDNPMLCSEYIKDIYKYLRQLEVDQAVRPKYLEGQEVTGNMRAILIDWLVQVQVKFRLLQETMYMTVGIIDRFLQDNPVPKKQLQLVGVTAMFLASKYEEMYPPEIADFAFVTDRAYTTAQIRDMEMKILRVLNFSFGRPLPLQFLRRASKIGEVTAEHHTLAKYFMELTMVDYEMVHFPPSLVASAAFALSLKVFDCGEWTPTLQYYMDYTEACLIPVMQHIAKNVVKVNEGHTKHMAVKNKYGSQKQMRISHLPQLKSSVIKDLAKQLS

SEQ ID NO: 7411 - DNA, 1290 bp, Cricetulus griseus
  CDS (1)..(1290)
atggcgctcagagtcactaggaacacgaaacttaacacagaaaataaggccaaggtcagcatgacaggcgccaagcgtgtgcctgtggcgattgctgcagcctccaagcccgggctgagaccgagaaccgctctaggggatattggtaacaaagtcagcgaacaggcacaggcaagagtgcctctgaaaaaggaactaaaaacctcagttactggaaaagtttcagctaaaatcccaccaccaaaacctcaggagaaggttcctgtgagtgagccagaggtggaacttgctgagcctgaacctgaacctgaacctgttatggaggaaaagctttctcctgaacctatcttggttgataatccctctccaagcccaatggaaacatctggatgtgcccctgcagaagaatacctgtgtcaggctttctctgatgtaattcttgccgtgagcgatgtggatgcagatgatggcgctgatccaaacctctgtagtgaatatgtgaaagacatatatgcttatctcagacagctggaggaagaacaatcagttagaccaagatatctactgggccgtgaagtcactggaaacatgagagccatcctaattgactggctgatacaggttcaaatgaaatttaggctgctgcaagagactatgtacatgactgtttccattattgaccggttcatgcaggataactgtgtacccaagaagatgctgcagctagttggtgtgactgccatgtttattgcaagcaaatatgaagaaatgtaccctccagaaataggtgacttcgcttttgtgactaataatacttacactaagcaccaaatcagacagatggaaatgaagattttaagagttctaaacttcagtttgggtcgccctctgcctctgcacttcctccgtagagcctctaagattggagaggttgacgttgaacagcatactttggccaaatacctcatggagctcactatgttggactatgacatggtgcactttgctccttctcagattgcagctggagctttttgcttagcactgaaaattcttgacaacggtgaatggacaccgaccctgcagcactacctgtcctatactgaagaatcccttctgcctgtcatgcagcacctggctaagaatgtagtcatggtgaaccgtggccttacaaagcacatgactatcaagaacaagtatgcaacatccaagcatgctaagatcagcactctggcacagctgaattgtacactagttcagaatttgtccaaggctgtgtcaaaggcataa

SEQ ID NO: 7412 - protein, 429 aa, Cricetulus griseus
MALRVTRNTKLNTENKAKVSMTGAKRVPVAIAAASKPGLRPRTALGDIGNKVSEQAQARVPLKKELKTSVTGKVSAKIPPPKPQEKVPVSEPEVELAEPEPEPEPVMEEKLSPEPILVDNPSPSPMETSGCAPAEEYLCQAFSDVILAVSDVDADDGADPNLCSEYVKDIYAYLRQLEEEQSVRPRYLLGREVTGNMRAILIDWLIQVQMKFRLLQETMYMTVSIIDRFMQDNCVPKKMLQLVGVTAMFIASKYEEMYPPEIGDFAFVTNNTYTKHQIRQMEMKILRVLNFSLGRPLPLHFLRRASKIGEVDVEQHTLAKYLMELTMLDYDMVHFAPSQIAAGAFCLALKILDNGEWTPTLQHYLSYTEESLLPVMQHLAKNVVMVNRGLTKHMTIKNKYATSKHAKISTLAQLNCTLVQNLSKAVSKA

SEQ ID NO: 7413 - DNA, 1302 bp, Homo sapiens
  CDS (1)..(1302)
atggcgctccgagtcaccaggaactcgaaaattaatgctgaaaataaggcgaagatcaacatggcaggcgcaaagcgcgttcctacggcccctgctgcaacctccaagcccggactgaggccaagaacagctcttggggacattggtaacaaagtcagtgaacaactgcaggccaaaatgcctatgaagaaggaagcaaaaccttcagctactggaaaagtcattgataaaaaactaccaaaacctcttgaaaaggtacctatgctggtgccagtgccagtgtctgagccagtgccagagccagaacctgagccagaacctgagcctgttaaagaagaaaaactttcgcctgagcctattttggttgatactgcctctccaagcccaatggaaacatctggatgtgcccctgcagaagaagacctgtgtcaggctttctctgatgtaattcttgcagtaaatgatgtggatgcagaagatggagctgatccaaacctttgtagtgaatatgtgaaagatatttatgcttatctgagacaacttgaggaagagcaagcagtcagaccaaaatacctactgggtcgggaagtcactggaaacatgagagccatcctaattgactggctagtacaggttcaaatgaaattcaggttgttgcaggagaccatgtacatgactgtctccattattgatcggttcatgcagaataattgtgtgcccaagaagatgctgcagctggttggtgtcactgccatgtttattgcaagcaaatatgaagaaatgtaccctccagaaattggtgactttgcttttgtgactgacaacacttatactaagcaccaaatcagacagatggaaatgaagattctaagagctttaaactttggtctgggtcggcctctacctttgcacttccttcggagagcatctaagattggagaggttgatgtcgagcaacatactttggccaaatacctgatggaactaactatgttggactatgacatggtgcactttcctccttctcaaattgcagcaggagctttttgcttagcactgaaaattctggataatggtgaatggacaccaactctacaacattacctgtcatatactgaagaatctcttcttccagttatgcagcacctggctaagaatgtagtcatggtaaatcaaggacttacaaagcacatgactgtcaagaacaagtatgccacatcgaagcatgctaagatcagcactctaccacagctgaattctgcactagttcaagatttagccaaggctgtggcaaaggtgtaa

SEQ ID NO: 7414 - protein, 433 aa, Homo sapiens
MALRVTRNSKINAENKAKINMAGAKRVPTAPAATSKPGLRPRTALGDIGNKVSEQLQAKMPMKKEAKPSATGKVIDKKLPKPLEKVPMLVPVPVSEPVPEPEPEPEPEPVKEEKLSPEPILVDTASPSPMETSGCAPAEEDLCQAFSDVILAVNDVDAEDGADPNLCSEYVKDIYAYLRQLEEEQAVRPKYLLGREVTGNMRAILIDWLVQVQMKFRLLQETMYMTVSIIDRFMQNNCVPKKMLQLVGVTAMFIASKYEEMYPPEIGDFAFVTDNTYTKHQIRQMEMKILRALNFGLGRPLPLHFLRRASKIGEVDVEQHTLAKYLMELTMLDYDMVHFPPSQIAAGAFCLALKILDNGEWTPTLQHYLSYTEESLLPVMQHLAKNVVMVNQGLTKHMTVKNKYATSKHAKISTLPQLNSALVQDLAKAVAKV

SEQ ID NO: 7415 - DNA, 1287 bp, Medicago varia
  CDS (1)..(1287)
atgaagttttctgaggagaagaatgtttctaacaaccccacaaattttgaaggagggttagattctagaaaggttgggcaaaacagaagagcattgggtgtgattaatcagaatttggttgtggaaggacgtccttatccttgtgttgttaacaagagggcattgtcagagagaaatgatgtttgtgagaagaaacaagcggatccggttcatcgacccatcactaggaggtttgctgcaaagattgctagcacaaaaacatctaatgctgagggaactaccaaaaggtcaaacttggcaaaatcaagttcaaatggatttggagatttcatatttgttgatgatgaacacaagccagtggaggatcagccagtgccaatggctttagagcaaacagaaccaatgcatagtgaatcagatcagatggaggaagttgagatggaggatatcatggaagagcctgttatggacattgacacccctgatgcaaatgaccctcttgcagttgctgaatatattgaagatctttactcttactacagaaaagttgagagtactagctgtgtttcaccaaactatatggcacagcaatttgacattaatgaaaggatgagggctatactggttgactggcttattgaggtgcatgacaaattcgacctcatgcatgagacattgtttctcactgtcaatcttatagacagatttttggaaaagcagtctgtggtaagaaagaagcttcagttggttggtttagtggcaatgcttttggcatgcaagtatgaggaagtttcagtgcctgtggttggagatctaattcttatatcagacagagcatacacccggaaagaagttctggaaatggagaaggtgatggtcaatgcattgaagtttaacatatctgtgccgacagcctatgttttcatgagaaggttcttaaaggcggctcaagcagacagaaaacttgagctgctagctttcttcttgattgagctatctcttgtagaatatgcaatgttgaagttctctccttctcaactagctgccgctgctgtctatacagctcaatgcactatgtatggtgtcaaacagtggagtaagacatgtgaatggcacaccaactactctgaagatcaactcttagaatgctctagtttaatggttgactttcacaagaaggctgggacagggaaacttacaggagcacataggaagtattgcacatcaaaatttagctatactgcgaaatgtgaaccagcaagttttcttctggagaacgagttgtag

SEQ ID NO: 7416 - protein, 428 aa, Medicago varia
MKFSEEKNVSNNPTNFEGGLDSRKVGQNRRALGVINQNLVVEGRPYPCVVNKRALSERNDVCEKKQADPVHRPITRRFAAKIASTKTSNAEGTTKRSNLAKSSSNGFGDFIFVDDEHKPVEDQPVPMALEQTEPMHSESDQMEEVEMEDIMEEPVMDIDTPDANDPLAVAEYIEDLYSYYRKVESTSCVSPNYMAQQFDINERMRAILVDWLIEVHDKFDLMHETLFLTVNLIDRFLEKQSVVRKKLQLVGLVAMLLACKYEEVSVPVVGDLILISDRAYTRKEVLEMEKVMVNALKFNISVPTAYVFMRRFLKAAQADRKLELLAFFLIELSLVEYAMLKFSPSQLAAAAVYTAQCTMYGVKQWSKTCEWHTNYSEDQLLECSSLMVDFHKKAGTGKLTGAHRKYCTSKFSYTAKCEPASFLLENEL

SEQ ID NO: 7417 - DNA, 1290 bp, Mesocricetus auratus
  CDS (1)..(1290)
atggcgctcagggtcactaggaacacgaaacttaacacagaaaataaggccaaggtcagcatggcaggcgccaaggctgtgcctgtgacacttgctgcggcctccaagcccgggctgagaccaagaaccgctctaggagatattggtaacaaagtcagcgagcaggcacaggcaagactgcctctgaaaaaggaactaaaaacttcagttactggaaaagtttcagctaaaatcccgccaccaaaacctctggagaaggttcctcctgtgagtgaaccagaggtggaacttgctgagacacatgagcctgaacctgttatggacgaaaagctttctcctgaacctattttggttgataatccctctccaagcccaatggaaacatctggatgtgcccctgcagaagaatacctgtgccaggctttctctgatgtaattcttgccgtgagtgatgtggatgcagatgatggtgctgatccaaacctctgtagcgaatatgtgaaagacatatatgcctatctcagacaactggaggaagagcagtcagttagaccaaaatacctactgggtcgtgaagtcactggaaacatgagagccatcctaattgactggctgatacaggttcaaatgaaattcaggttgttgcaggagaccatgtacatgactgtctccattattgatcggttcatgcaggataattgtgtgcccaagaagatgctgcagctagttggtgtgacagccatgtttattgccagcaaatatgaagaaatgtaccctccagaaataggtgacttcgcttttgtgactaacaatacttacactaagcaccaaatcagacaaatggaaatgaagattctaagagttctaaactttagtttgggtcgccctctgcctctgcacttcctccgtagaacgtctaagattggagaggttgacgttgaacagcatactttggccaaatacctcatggagctcactttgttggactatgacatggtcgactttgctccttctcagattgcagctggagctttttgcttagcactgaaaatccttgacaatggtgaatggacaccaaccctgcagcactacctgtcctacactgaagaatcccttctgcctgtcatgcagcacctggctaagaatgtagtcatggtgaaccatggccttacaaagcacatgactatcaagaataagtatgcaacatccaagcatgctaagatcagcactctggcacagctgaattgtacactagttcagaatttgtccaaggctgtggcaaaggcgtaa

SEQ ID NO: 7418 - protein, 429 aa, Mesocricetus auratus
MALRVTRNTKLNTENKAKVSMAGAKAVPVTLAAASKPGLRPRTALGDIGNKVSEQAQARLPLKKELKTSVTGKVSAKIPPPKPLEKVPPVSEPEVELAETHEPEPVMDEKLSPEPILVDNPSPSPMETSGCAPAEEYLCQAFSDVILAVSDVDADDGADPNLCSEYVKDIYAYLRQLEEEQSVRPKYLLGREVTGNMRAILIDWLIQVQMKFRLLQETMYMTVSIIDRFMQDNCVPKKMLQLVGVTAMFIASKYEEMYPPEIGDFAFVTNNTYTKHQIRQMEMKILRVLNFSLGRPLPLHFLRRTSKIGEVDVEQHTLAKYLMELTLLDYDMVDFAPSQIAAGAFCLALKILDNGEWTPTLQHYLSYTEESLLPVMQHLAKNVVMVNHGLTKHMTIKNKYATSKHAKISTLAQLNCTLVQNLSKAVAKA

SEQ ID NO: 7419 - DNA, 1293 bp, Mus musculus
  CDS (1)..(1293)
atggcgctcagggtcactaggaacacgaaaattaacgcagaaaataaggccaaggtcagtatggcaggcgccaagcgtgtgcctgtgacagttactgctgcttccaagcccgggctgagaccgagaactgctcttggagacattggtaataaagtcagcgaagagctacaggcaagagtgcctctgaaaagggaagcaaaaacgctaggtactggaaaaggtactgttaaagccctaccaaaacctgtagagaaggtgcctgtgtgtgaaccagaggtggaacttgctgagcctgagcctgaacctgaacttgaacatgttagagaagagaagctttctcctgaacctattttggttgataatccctctccaagcccgatggaaacatctggatgtgcgcctgcagaagagtatctgtgtcaggctttctctgatgtaatccttgcagtgagtgacgtagacgcagatgatggggctgacccaaacctctgtagtgaatatgtgaaagatatctatgcttatctccgacaactggaggaagagcagtcagttagaccaaaatacctacagggtcgtgaagtgactggaaacatgagagctatcctcattgactggctaatacaggttcagatgaaatttaggctgcttcaggagaccatgtacatgactgtgtccattattgatcggttcatgcagaacagttgtgtgcccaagaagatgctacagctggtcggtgtaacggccatgtttattgcaagcaaatatgaggagatgtaccctccagaaataggtgacttcgcctttgtgactaacaacacgtacactaagcaccagatcagacagatggagatgaagattctcagagttctgaacttcagcctgggtcgccctctgcctctgcacttcctccgtagagcatctaaagtcggagaggttgacgtcgagcagcacactttggccaaatacctcatggagctctccatgctggactacgacatggtgcattttgctccttctcaaattgcagctggggctttctgcttagcgctgaaaattcttgacaacggtgaatggacaccaactctgcagcactacctatcctacagtgaagactccctgcttcctgttatgcagcacctggctaagaatgtagtcatggtgaactgtggcctcacaaagcacatgactgtcaagaacaagtatgcagcatctaagcatgctaagatcagcacgctggcacagctgaactgtacactagttcagaatttgtctaaggccgtgacaaaggcataa

SEQ ID NO: 7420 - protein, 430 aa, Mus musculus
MALRVTRNTKINAENKAKVSMAGAKRVPVTVTAASKPGLRPRTALGDIGNKVSEELQARVPLKREAKTLGTGKGTVKALPKPVEKVPVCEPEVELAEPEPEPELEHVREEKLSPEPILVDNPSPSPMETSGCAPAEEYLCQAFSDVILAVSDVDADDGADPNLCSEYVKDIYAYLRQLEEEQSVRPKYLQGREVTGNMRAILIDWLIQVQMKFRLLQETMYMTVSIIDRFMQNSCVPKKMLQLVGVTAMFIASKYEEMYPPEIGDFAFVTNNTYTKHQIRQMEMKILRVLNFSLGRPLPLHFLRRASKVGEVDVEQHTLAKYLMELSMLDYDMVHFAPSQIAAGAFCLALKILDNGEWTPTLQHYLSYSEDSLLPVMQHLAKNVVMVNCGLTKHMTVKNKYAASKHAKISTLAQLNCTLVQNLSKAVTKA

SEQ ID NO: 7421 - DNA, 1206 bp, Oryzias curvinotus
  CDS (1)..(1206)
atggctctgagagttaccaggaaccgactggcctccactcgggccgagctgggcggaaagacgtgctcggtggccgggcctacacagaagccccgcgcggccctcggagagatcggaaacgtcgcagttatcaacaaagatgtcacgaaaaagaatgtcaagacggaggttgctaagaagacaaagattccagctaaagctgagaagatcgagcaaccaaaagctgctgtggtccctgttaaaccagcacctgaagtgcaggtgccagtccaggctgaccctgcatcccccacccccatggagacctctggatgtgagcctgctgacctctgtcaagcgttttcagacgtcatcctcaacacggccatcagggacgtggatgcagatgactacgacaaccccatgctctgcagtgaatatgtgaaggacatctacaagtaccttcggcagcttgaggtggagcagagcgtaaaaccaaactaccttgagggtcaagaggtcaccggaaacatgcgagccatcctcattgactggctggtacaagtgagcctcaagttccgtctgctgccggagaccatgtacatgactgtgggaataatcgaccggtttcttcaggaccatccagtccccaagaagcagctgcagctggttggcgtgaccgccatgttcctggcctccaaatacgaggaaatgtaccctccggagatctcagactttgcctttgtgacagacagggcttacaccactgctcagatcagagacatggaaatgactgttctgcgagtgctgaagtttcagctgggccgccccctcccgctgcagttcctcagaagggcctcaaagatctatgaggtaactgctgaccaacacaccctagccaagtacctgctggagctctccatggttgactacgacatggctcatttcccgccctccatggtggcgagtgcagctctggcactgacgctcaaggtcctggatgcaggggaatgggatgtgacactgcagcattacatggggtacacagcagagaccctgactcctgtcatggcgcacatcgctaagaatgtcgtgaaagtcaacaatgggcaaactaaacacatggccatcaaaggaaaatactcaacatcaaagcagatgaggatcgccaccatctctcagctcaaatcctctgcggtgaaagatctggcgacacagatttcctag

SEQ ID NO: 7422 - protein, 401 aa, Oryzias curvinotus
MALRVTRNRLASTRAELGGKTCSVAGPTQKPRAALGEIGNVAVINKDVTKKNVKTEVAKKTKIPAKAEKIEQPKAAVVPVKPAPEVQVPVQADPASPTPMETSGCEPADLCQAFSDVILNTAIRDVDADDYDNPMLCSEYVKDIYKYLRQLEVEQSVKPNYLEGQEVTGNMRAILIDWLVQVSLKFRLLPETMYMTVGIIDRFLQDHPVPKKQLQLVGVTAMFLASKYEEMYPPEISDFAFVTDRAYTTAQIRDMEMTVLRVLKFQLGRPLPLQFLRRASKIYEVTADQHTLAKYLLELSMVDYDMAHFPPSMVASAALALTLKVLDAGEWDVTLQHYMGYTAETLTPVMAHIAKNVVKVNNGQTKHMAIKGKYSTSKQMRIATISQLKSSAVKDLATQIS

SEQ ID NO: 7423 - DNA, 1206 bp, Oryzias javanicus
  CDS (1)..(1206)
atggccctgagagtaacccggaatcgtctggcctccacccgggccgagcagggcggaaagacatgctctgtctccgggcctacactgaagccccgcgcggcgctcggagagatcggaaacgtcgctgctaacaaagatgttacaaaaaagaatgtcaagatggaggctgctaagaagactaggatcacagctaaagctgagaagatcgaacaaccaaaagctactgtggttcctgttaaaccagagcctaaagtgcaggtgccagcacagcctgagcctgcatcccccacccccatggagacctctggctgtgagcccgctgacctctgtcaagcgttctcagacgtcatcctcaacacggccatcagggatgtggatgcagacgactacgacaaccccatgctctgcagtgaatacgtgaaggacatctacaagtacctccgtcagcttgaggtagagcagagcgtcaaaccaaactacctacagggtcaggaggtcaccggaaacatgcgagccatcctcattgactggctggtgcaggtgaacctcaagttccgtctgctgcaggagaccatgtacatgactgtgggcataatcgaccgctttcttcaggaccatccagtccccaagaagcagctgcagctggtcggcgtgaccgctatgttcctggcctccaaatacgaggaaatgtaccctccggagatctcagacttcgcttatgtgacagacagggcctacaccactgctcagatcagagacatggagatgactattctacgagtgctgaagttccagctgggccgcccccttccgctgcagttcctcaggagggcctcaaagatctatgaggtgacggctgaacaacacaccctggctaaatacctgctggagctctccatcgtggactacgacatggctcacttcccaccctcaacggttgcaagtgcagctctggggctcacgttgaaggtcctggatgcaggggaatgggatgtgactctacagcattacatggattacacagcacacaccttgactcctgttatggcccacatcgccaagaatgtcgtgaaggtcaacgatggactgaccaaacacatggccatcaaaggaaaatactctacgtcaaagcagatgagggtcgccaccatcgctcagctcaaatcctcgctggttaaagatctggcgaagcagctttctcagtga

SEQ ID NO: 7424 - protein, 401 aa, Oryzias javanicus
MALRVTRNRLASTRAEQGGKTCSVSGPTLKPRAALGEIGNVAANKDVTKKNVKMEAAKKTRITAKAEKIEQPKATVVPVKPEPKVQVPAQPEPASPTPMETSGCEPADLCQAFSDVILNTAIRDVDADDYDNPMLCSEYVKDIYKYLRQLEVEQSVKPNYLQGQEVTGNMRAILIDWLVQVNLKFRLLQETMYMTVGIIDRFLQDHPVPKKQLQLVGVTAMFLASKYEEMYPPEISDFAYVTDRAYTTAQIRDMEMTILRVLKFQLGRPLPLQFLRRASKIYEVTAEQHTLAKYLLELSIVDYDMAHFPPSTVASAALGLTLKVLDAGEWDVTLQHYMDYTAHTLTPVMAHIAKNVVKVNDGLTKHMAIKGKYSTSKQMRVATIAQLKSSLVKDLAKQLSQ

SEQ ID NO: 7425 - DNA, 1215 bp, Oryzias latipes
  CDS (1)..(1215)
atggctctgagagttaccaggaaccgactggcctccacccgggccgaactgggcggaaagacgtgctcggtggccgggcctacacagaagccccgcgcggccctcggagaaatcggaaacgtcgcagttattaacaaagatgtcacgaaaaagactatcaagacggaggttgctaagaagacaaagatcccagctaaagctgagaagatcgagctaccaaaagctgctgtggtccctgttaaaccagcacctgaagtgcaggtgactgaggtgccagaccaggctgaacctgcatcccccacccccatggagacctctggatgtgagtctgctgacctctgtcaagcattttcagatgtcatcctcaacacggccatcagggacgtggatgcagatgactacgacaaccccatgctctgcagtgaatatgttaaggacatctacaagtacctccgtcagcttgagatggagcagagcgtaaagccaaactaccttgagggtcaggagatcaccggaaacatgcgagccatcctcattgactggctggtacaagtgggcctcaagttccgtctgctgcaggagaccatgtacatgactgtgggaataatcgaccgctttcttcaggaccatccagtccccaagaagcagctgcagctggttggcgtgaccgccatgttcctggcctccaaatacgaggagatgtaccctccggagatctcagactttgcctacgtgacggacagggcttacaccactgctcagatcagagacatggaaatgactattctgcgagtgctgaagtttcagctgggccgccccctcccgctgcagttcctcagaagggcctccaagatctatgaggtaactgctgaacaacacaccctggccaaatacctgctggagctctccatggttgactacgacatggctcatttctcgccctccttggtggcgagtgcagctctggcgctgacgctcaaggtcctggatgcaggggaatgggatgtgacactgcagcattacatggagtacacagcagagaccctgacacctgttatggcgcacatcgctaagaatgtcgtgaaagtcaacaatgggcaaactaaacacatggccatcaaaggaaaatactctacatcaaagcagatgaggatcgccaccatctctcagctcaaatcctctgtggtgaaagatctggcaacgcagatttcttag

SEQ ID NO: 7426 - protein, 404 aa, Oryzias latipes
MALRVTRNRLASTRAELGGKTCSVAGPTQKPRAALGEIGNVAVINKDVTKKTIKTEVAKKTKIPAKAEKIELPKAAVVPVKPAPEVQVTEVPDQAEPASPTPMETSGCESADLCQAFSDVILNTAIRDVDADDYDNPMLCSEYVKDIYKYLRQLEMEQSVKPNYLEGQEITGNMRAILIDWLVQVGLKFRLLQETMYMTVGIIDRFLQDHPVPKKQLQLVGVTAMFLASKYEEMYPPEISDFAYVTDRAYTTAQIRDMEMTILRVLKFQLGRPLPLQFLRRASKIYEVTAEQHTLAKYLLELSMVDYDMAHFSPSLVASAALALTLKVLDAGEWDVTLQHYMEYTAETLTPVMAHIAKNVVKVNNGQTKHMAIKGKYSTSKQMRIATISQLKSSVVKDLATQIS

SEQ ID NO: 7427 - DNA, 1206 bp, Oryzias luzonensis
  CDS (1)..(1206)
atggctctgagagttaccaggaaccgactggcctccgctcgggccgagctgggcggaaagacgtgctcggtggccgggcctacacagaagccccgcgcggccctcggagagatcggaaacgtcgcagttatcaacaaagatgtcacgaaaaagaatgtcaagacggaggttgctaagaagacaaaggttccagctaaagctgagaagatcgagcaaccaaaagctgctgtggtccctgttaaaccagcacctgaagtgcaggtgccagcccagcctgaacctgcatcccccacccccatggagacctctggatgtgagcctgctgacctctgtcaagcgttttcagacgtcatcctcaacacggccatcagggacgtggatgcagatgactacaacaaccccctgctctgcagtgaatatgtgaaggacatctacaagtacctccgtcagcttgaggtggagcagagcgtaaaaccaaactaccttgagggtcaagaggtcactggaaacatgcgagccctcctcattgactggctggtacaagtgagcctcaagttccgtctgctgcaggagacaatgtacatgactgtgggaataatcgaccgctttcttcaggaccatccagtccccaagaagcagctgcagctagttggcgtgaccgccatgttcctggcctccaaatatgaggaaatgtaccctccggagatctcagactttgcctatgtgaccgacaaggcttacaccactgctcagatcagagacatggaaatgactattctgcgagtgctgaagtttcagctgggccgccccctcccgctgcagttcctcagaagggcctcaaagatctatgaggtaactgctgaacaacacaccctggccaaatacctgctggagctctccatggttgactacgccatggatcatttcccgccctctatggtggcaagtgcagctctggcactgacgctcaaggtcctggatgcaggggaatgggatgtgacactgcagcattacatggcgtacacagcagacaccttgactcctgtcatggcgcacatcgcgaagaatgtcgtgaaagtcaacaatgggcaaactaaacacatgaccatcaaaggaaaatactttacatcaaagcagatgaggatcgccaccatttttcagctcaaatcctctgtggtgaaagatctggcgacacagatttcttag

SEQ ID NO: 7428 - protein, 401 aa, Oryzias luzonensis
MALRVTRNRLASARAELGGKTCSVAGPTQKPRAALGEIGNVAVINKDVTKKNVKTEVAKKTKVPAKAEKIEQPKAAVVPVKPAPEVQVPAQPEPASPTPMETSGCEPADLCQAFSDVILNTAIRDVDADDYNNPLLCSEYVKDIYKYLRQLEVEQSVKPNYLEGQEVTGNMRALLIDWLVQVSLKFRLLQETMYMTVGIIDRFLQDHPVPKKQLQLVGVTAMFLASKYEEMYPPEISDFAYVTDKAYTTAQIRDMEMTILRVLKFQLGRPLPLQFLRRASKIYEVTAEQHTLAKYLLELSMVDYAMDHFPPSMVASAALALTLKVLDAGEWDVTLQHYMAYTADTLTPVMAHIAKNVVKVNNGQTKHMTIKGKYFTSKQMRIATIFQLKSSVVKDLATQIS

SEQ ID NO: 7429 - DNA, 1272 bp, Rattus norvegicus
  CDS (1)..(1272)
atggcgctcagggtcactaggaacacgaaaattaacacagaaaataaggccaaggtcagcatggcaggcgccaagcgtgtgcctgtggcagttgctgcctccaaacccctgctgagatcgagaactgctcttggagacattggtaataaagtcagcgaacagtcaagaatacccctcaaaaaggaaacaaaaaagttaggttctggaacagttactgttaaagccctaccaaaacctgtggacaaggtgccagtgtgcgaaccagaggtggaactggatgagcctgagcctgaacctgttatggaagtgaaacactctcctgagcctattttggttgatactccctctccaagcccaatggaaacatctggatgtgcacctgccgaagaatatctgtgtcaggctttctccgatgtgattcttgcagtgagtgatgtagatgcagacgatggtggtgatccaaacctctgtagtgaatatgtgaaagatatctatgcttacctcagacaactggaggaagagcagtcagttagaccaaaatacctactgggtcgtgaagtcactggaaacatgagagccatcctaatcgactggctaatacaggttcagatgaaatttcggctgctgcaggagaccatgtacatgactgtgtccattatcgatcggttcatgcaggacagttgtgtgcccaagaagatgctgcagctggttggtgtaactgccatgtttattgcaagcaaatacgaggagatgtaccctccagagatcggtgacttcgcttttgtgactaacaacacttacaccaagcaccagatcagacagatggagatgaagattctgagagttctgaacttcagtctgggtcgccctctgcctctgcacttcctccgtagagcatctaaaattggagaggtcgatgttgagcagcatactttggccaaatacctcatggagctctccatgctggactacgacatggtgcattttgccccttctcaaattgcagctggggctttttgcttagccctgaaaattcttgacaacggtgaatggacaccaactctgcagcactacctgtcccacacggaggaatctctgcttcctgtgatgcagcacctggctaagaacatagtcatggtgaaccgtggcctcacaaagcacatgacgatcaagaacaagtatgcaacatctaagcatgctaagatcagcactctggcacagctgaattgtacactagttcagaatttgtctaaggccgtgacaaaggcgtaa

SEQ ID NO: 7430 - protein, 423 aa, Rattus norvegicus
MALRVTRNTKINTENKAKVSMAGAKRVPVAVAASKPLLRSRTALGDIGNKVSEQSRIPLKKETKKLGSGTVTVKALPKPVDKVPVCEPEVELDEPEPEPVMEVKHSPEPILVDTPSPSPMETSGCAPAEEYLCQAFSDVILAVSDVDADDGGDPNLCSEYVKDIYAYLRQLEEEQSVRPKYLLGREVTGNMRAILIDWLIQVQMKFRLLQETMYMTVSIIDRFMQDSCVPKKMLQLVGVTAMFIASKYEEMYPPEIGDFAFVTNNTYTKHQIRQMEMKILRVLNFSLGRPLPLHFLRRASKIGEVDVEQHTLAKYLMELSMLDYDMVHFAPSQIAAGAFCLALKILDNGEWTPTLQHYLSHTEESLLPVMQHLAKNIVMVNRGLTKHMTIKNKYATSKHAKISTLAQLNCTLVQNLSKAVTKA

SEQ ID NO: 7431 - DNA, 1194 bp, Xenopus laevis
  CDS (1)..(1194)
atgtcgctacgagtcaccagaaacatgctggcaaatgcagaaaacaatgtgaaaaccactttggctggaaagagggttgttgctaccaaaccagggttgagacctcgtacagccttgggagacattggaaacaaggcagaggtgaaagtgccaacaaaaaaggaattaaagccagcagtaaaagctgccaagaaggcaaaacctgttgacaaattgttggagcctcttaaagtgatagaagagaatgtttgccctaaacctgctcaggttgaacccagctcaccaagcccaatggaaacatctggttgcctccctgatgagctctgccaggctttctctgatgtcctcattcacgttaaagatgttgatgctgatgatgatggcaacccaatgctgtgcagtgaatatgtcaaggacatttatgcttacctgaggagccttgaggatgcacaagcagtcagacaaaactaccttcatggacaggaagtcacaggcaacatgcgtgccattttgattgactggctggtccaggtgcaaatgaaattccgtctactgcaggagacaatgttcatgactgttggcataattgaccgctttctgcaggaacatccagttcccaaaaaccagctacagcttgtgggggtcacggctatgttccttgctgctaaatatgaagagatgtacccaccagaaattggagactttacatttgtaactgatcacacatacacaaaggctcaaattcgggacatggaaatgaagatacttagggtgctaaagtttgcaattggccgacccttacccctgcactttcttcggagagcttctaaaattggagaggtaactgctgaacagcatagtttagccaaatatttgatggaacttgtgatggtggattatgatatggtacatttcacgccttcccaaatagcagctgcttcctcctgcttgtctctcaaaatcttaaatgcaggtgactggaccccaacactccatcactatatggcttactctgaagaagatctagtccctgttatgcagcatatggccaagaacatcatcaaggtgaacaaaggactaaccaagcatctgactgttaagaacaagtatgctagcagcaaacaaatgaagatcagcacgattccacagctgaggtcagatgttgttgtggaaatggcccgcccactcatgtga

SEQ ID NO: 7432 - protein, 397 aa, Xenopus laevis
MSLRVTRNMLANAENNVKTTLAGKRVVATKPGLRPRTALGDIGNKAEVKVPTKKELKPAVKAAKKAKPVDKLLEPLKVIEENVCPKPAQVEPSSPSPMETSGCLPDELCQAFSDVLIHVKDVDADDDGNPMLCSEYVKDIYAYLRSLEDAQAVRQNYLHGQEVTGNMRAILIDWLVQVQMKFRLLQETMFMTVGIIDRFLQEHPVPKNQLQLVGVTAMFLAAKYEEMYPPEIGDFTFVTDHTYTKAQIRDMEMKILRVLKFAIGRPLPLHFLRRASKIGEVTAEQHSLAKYLMELVMVDYDMVHFTPSQIAAASSCLSLKILNAGDWTPTLHHYMAYSEEDLVPVMQHMAKNIIKVNKGLTKHLTVKNKYASSKQMKISTIPQLRSDVVVEMARPLM

SEQ ID NO: 7433 - DNA, 1185 bp, Anguilla japonica
  CDS (1)..(1185)
atgtctttggcagtacgcggaattaatcgaaatgcagaaaacgcagccccgatgggcaaggccatcacagacgggacgaggaggcctgtgcttggcgaaatttccaacttcgccaataaagcggtacaagtcaagaaaaacacgaccttgaaggctcaggccgtgaagactgctaagccagcgtcgcagcagcagacactgccgacggctgcgctgcacaagcgcgctccagtcctacccgtgatcgctgacccaccacaagttgtttcggtttccaccgatgtggccattaaggaggaggagttgtgccaggccttttccgatgcacttttagccgtagaagatatcgatgaaggcgatgctgatatgcctcagttgtgctccgaatacgtgaaggatatctacgtgtatcttcggaacctcgaggtccagcagtgtattcgtcccaggtacatgcagggctacgagatcaacgagcgtatgcgcgcactcctggtggactggctaatccaggtgcactccaggttccagctgctgcaggaaaccctgtacatgaccgttgccatcttggatcgcttcctccaggtgcagccggtctcccggcggaagctgcagctggtcggcgtgaccgccatgctcgtcgcttccaagtacgaggaaatgtacgccccggaggtcggggacttcgtctacatcacagacaacgccttcaccaaggctcagatccgcgagatggagatgcttatactgcgggacctcaacttccagctgggtcgccctctgcccctgcacttcctcagaagggcctccaaggctggcagtgctgatgcagagaaacacacgctggccaagtacctgatggagctgaccctaatggactacgatatgctgcattaccacccctctgaaattgccgctgctgccctctgtctctcccagctggtgctagatggacaaaaatggtctgcaacccagcaacattactccacctacaatgaggaccacctcaagcccatcatgcaacacatggccaaaaatgtggtcagggtcaacgagggactgacaaagcacatggctatcaagaacaagtacgccagtagcaggctgatgaggatcagtctcctccctcaactcaaggccgcagtcatcaaggatctggctgctcccctgctccctcagtcctga

SEQ ID NO: 7434 - protein, 394 aa, Anguilla japonica
MSLAVRGINRNAENAAPMGKAITDGTRRPVLGEISNFANKAVQVKKNTTLKAQAVKTAKPASQQQTLPTAALHKRAPVLPVIADPPQVVSVSTDVAIKEEELCQAFSDALLAVEDIDEGDADMPQLCSEYVKDIYVYLRNLEVQQCIRPRYMQGYEINERMRALLVDWLIQVHSRFQLLQETLYMTVAILDRFLQVQPVSRRKLQLVGVTAMLVASKYEEMYAPEVGDFVYITDNAFTKAQIREMEMLILRDLNFQLGRPLPLHFLRRASKAGSADAEKHTLAKYLMELTLMDYDMLHYHPSEIAAAALCLSQLVLDGQKWSATQQHYSTYNEDHLKPIMQHMAKNVVRVNEGLTKHMAIKNKYASSRLMRISLLPQLKAAVIKDLAAPLLPQS

SEQ ID NO: 7435 - DNA, 1197 bp, Bos taurus
  CDS (1)..(1197)
atggcgctgctccgacgcccgacggtgtccaccgatttagagaataatgacacgggagttaattctaaacctaaaagtcatgtgactatcaggcgggcagttttagaagaaattggaaatcgggttacaacccgagccatacaagtagctaagaaagcccagaacactaaagtacctgttccacccaccaaaacaacaaatgtcaacaagcacccgaaacctactgcttctgtgaaaccagtgcagatggatgtgttggctccaaagggtccttctcccacacctcaggacatctccatgaaggaggagaacctctgccaagctttttctgatgccttgctctgcaaaattgaggatattgataccgaggactgggagaaccctcagctctgcagtgactacgtaaaggatatctaccagtatctaaggcagcttgaggttctgcagtccataaacccacatttcctagatgggagagacataaacggccgcatgcgtgccatcctggtggactggctggtgcaagtgcactccaagttcaggctgctgcaggaaacgctgtacatgtgtgttgccgtcatggaccgatatttacaggttcagccagtctctcgtaagaagcttcagctggttggcattacggcactgctcttggcttccaagtatgaggaaatgttttctccaaacatcgaagactttgtttacatcactgacaatgcttataccagttctcaaattcgagaaatggaaactctgattttgaaggaactgaaatttgagctgggtcgaccgctgccgctacattttttaaggcgggcgtcgaaagctggggaggtcgatgttgaacagcacactttggccaaatacttgatggagctgactctcgttgactatgacatggtgcactatcacccttccaaggtggcggcagccgcttcctgcctgtcccagaaggttctaggccaaggaaaatggaacttaaagcagcagtattacaccggctacacagagagcgaggtgctggaggtcatgcggcacatggccaaaaacgtcgtgcgtgtcaacgagaacatgaccaagttcaccgccatcaagaataagtatgcaagcagcaaactcctgaagatcagcacgattcctcagttgaactcaaaagccatccaggagcttgcctcacctctgctgggacggtcctag

SEQ ID NO: 7436 - protein, 398 aa, Bos taurus
MALLRRPTVSTDLENNDTGVNSKPKSHVTIRRAVLEEIGNRVTTRAIQVAKKAQNTKVPVPPTKTTNVNKHPKPTASVKPVQMDVLAPKGPSPTPQDISMKEENLCQAFSDALLCKIEDIDTEDWENPQLCSDYVKDIYQYLRQLEVLQSINPHFLDGRDINGRMRAILVDWLVQVHSKFRLLQETLYMCVAVMDRYLQVQPVSRKKLQLVGITALLLASKYEEMFSPNIEDFVYITDNAYTSSQIREMETLILKELKFELGRPLPLHFLRRASKAGEVDVEQHTLAKYLMELTLVDYDMVHYHPSKVAAAASCLSQKVLGQGKWNLKQQYYTGYTESEVLEVMRHMAKNVVRVNENMTKFTAIKNKYASSKLLKISTIPQLNSKAIQELASPLLGRS

SEQ ID NO: 7437 - DNA, 1200 bp, Gallus gallus
  CDS (1)..(1200)
atggcgttaacgcgtcgcgcagccgtcatgagaggggtggagaatgccgtgactggacataataccaaagccaaagttcaggtgactggcaagagggctgttttggaagaaataggtaacaaagttgcaagaggatccaatgtgcccaagaaaacggactgcatcaaaccaccagtaaaggctacgaaaggacctggcaagatgacaaacacggttgtaccacctaaacctccagctgctgtgaatcaagcagtcaaagacactactactgcttcaaaggttctgtctcctgtccctatggatgtatctatgcaagaggaggatttgtgtcaagccttctctgatgtgttgctccacaacatagaagacatcgatgcggatgactcggggaacccccagttatgtagtgactatgtaaaagatatctacctgtatctgagacagcttgagctgcagcaatctgtgcgcccacattaccttgatgggaagacgatcaatggacgtatgcgtgcaattttagttgactggcttgtccaggtccactcaaggttccagcttcttcaggaaacgctgtatatgtgtgttgcagttatggaccgcttcttacaaagtcatccagtacctcgtaagaggcttcagttggtgggtgtaacagcgctgcttctagcctcaaaatatgaagagatgtactctcctgatatagcagactttgtttatattaccgacaatgcctacaacagtgctgaagttagagaaatggagatcacgattctgaaagaattgaactttgatttgggacggcctcttccacttcacttcttacgaagagcatcaaaagctggggaggcggatgctgagcaacatacgctagcaaaatacctaatggaactgacactgatagactacgacatggtgcactatcacccttcagagatcgcagccgctgcgctgtgcttgtcgcagaaggttctgggccatgataagtggggtacaaagcagcagtactatactgggtatgcagaagacagtcttgcaatgactatgaagcatatggccaagaatgtcgtcaaagtaaatgaaaacttaacaaaatatactgctgtaaggaacaagtatgcaagtagcaaactcctgaggatcagcacaatctctcaactgaactctaagactatcaaggacctagctgcatcactcttataa

SEQ ID NO: 7438 - protein, 399 aa, Gallus gallus
MALTRRAAVMRGVENAVTGHNTKAKVQVTGKRAVLEEIGNKVARGSNVPKKTDCIKPPVKATKGPGKMTNTVVPPKPPAAVNQAVKDTTTASKVLSPVPMDVSMQEEDLCQAFSDVLLHNIEDIDADDSGNPQLCSDYVKDIYLYLRQLELQQSVRPHYLDGKTINGRMRAILVDWLVQVHSRFQLLQETLYMCVAVMDRFLQSHPVPRKRLQLVGVTALLLASKYEEMYSPDIADFVYITDNAYNSAEVREMEITILKELNFDLGRPLPLHFLRRASKAGEADAEQHTLAKYLMELTLIDYDMVHYHPSEIAAAALCLSQKVLGHDKWGTKQQYYTGYAEDSLAMTMKHMAKNVVKVNENLTKYTAVRNKYASSKLLRISTISQLNSKTIKDLAASLL

SEQ ID NO: 7439 - DNA, 1197 bp, Homo sapiens
  CDS (1)..(1197)
atggcgctgctccgacgcccgacggtgtccagtgatttggagaatattgacacaggagttaattctaaagttaagagtcatgtgactattaggcgaactgttttagaagaaattggaaatagagttacaaccagagcagcacaagtagctaagaaagctcagaacaccaaagttccagttcaacccaccaaaacaacaaatgtcaacaaacaactgaaacctactgcttctgtcaaaccagtacagatggaaaagttggctccaaagggtccttctcccacacctgaggatgtctccatgaaggaagagaatctctgccaagctttttctgatgccttgctctgcaaaatcgaggacattgataacgaagattgggagaaccctcagctctgcagtgactacgttaaggatatctatcagtatctcaggcagctggaggttttgcagtccataaacccacatttcttagatggaagagatataaatggacgcatgcgtgccatcctagtggattggctggtacaagtccactccaagtttaggcttctgcaggagactctgtacatgtgcgttggcattatggatcgatttttacaggttcagccagtttcccggaagaagcttcaattagttgggattactgctctgctcttggcttccaagtatgaggagatgttttctccaaatattgaagactttgtttacatcacagacaatgcttataccagttcccaaatccgagaaatggaaactctaattttgaaagaattgaaatttgagttgggtcgacccttgccactacacttcttaaggcgagcatcaaaagccggggaggttgatgttgaacagcacactttagccaagtatttgatggagctgactctcatcgactatgatatggtgcattatcatccttctaaggtagcagcagctgcttcctgcttgtctcagaaggttctaggacaaggaaaatggaacttaaagcagcagtattacacaggatacacagagaatgaagtattggaagtcatgcagcacatggccaagaatgtggtgaaagtaaatgaaaacttaactaaattcatcgccatcaagaataagtatgcaagcagcaaactcctgaagatcagcatgatccctcagctgaactcaaaagccgtcaaagaccttgcctccccactgataggaaggtcctag

SEQ ID NO: 7440 - protein, 398 aa, Homo sapiens
MALLRRPTVSSDLENIDTGVNSKVKSHVTIRRTVLEEIGNRVTTRAAQVAKKAQNTKVPVQPTKTTNVNKQLKPTASVKPVQMEKLAPKGPSPTPEDVSMKEENLCQAFSDALLCKIEDIDNEDWENPQLCSDYVKDIYQYLRQLEVLQSINPHFLDGRDINGRMRAILVDWLVQVHSKFRLLQETLYMCVGIMDRFLQVQPVSRKKLQLVGITALLLASKYEEMFSPNIEDFVYITDNAYTSSQIREMETLILKELKFELGRPLPLHFLRRASKAGEVDVEQHTLAKYLMELTLIDYDMVHYHPSKVAAAASCLSQKVLGQGKWNLKQQYYTGYTENEVLEVMQHMAKNVVKVNENLTKFIAIKNKYASSKLLKISMIPQLNSKAVKDLASPLIGRS

SEQ ID NO: 7441 - DNA, 990 bp, Medicago sativa
  CDS (1)..(990)
atgaattcgaatgagtttggaaacttcatcgccattgatgatgaactcaagttaccagaagaccaaccagagcctatgactttggagcatactgaaccaatgcatagtgatccacttgagatggaagaggttgagatggaggatatagagggagagatgattttggacattgatagctgtgatgcaaacaattctcttgctgttgtggagtatattgaagatctccatgcttactacagaaagattgagtatcttggctgtgtttcaccaacctacatggatgaacaacttgacctcaatgagaggatgagggctatactagttgactggctgattgaggttcatgacaaattcgacctcatgcaagagacactgtttcttacagttaatctcatcgacagattcttggctaagcagaatgttgtaagaaagaaacttcagctggttggtcttgttgccatgcttttggcatgcaagtatgaggaagtttctgtgcctgtcgtttcggatctgatccatatagctgacagagcttacacaaggaaagacattctcgaaatggagaagttgatgctcaacactctgcagtataacatgtctcttccaactgcttatgttttcatgagaaggtttctgaaggctgctcaagctgacaaaaaacttgagctggtggcttttttcttggttgacctatctctggtggaatatgagatgctgaagtttccaccatccttggttgctgctgctgctgtctacacagctcaatgcactgtcagtggtttcaaacactggaacaagacatgtgagtggcacacaaactactcagaagatcagctgttggagtgctctatgctgatggttggattccaccagaaagccggagccgggaaactgacaggagtgcataggaagtatggctcagcaaaatttagcttcactgctaaatgtgaaccagcatgttttcttctggagaacaagaaccagccataa

SEQ ID NO: 7442 - protein, 329 aa, Medicago sativa
MNSNEFGNFIAIDDELKLPEDQPEPMTLEHTEPMHSDPLEMEEVEMEDIEGEMILDIDSCDANNSLAVVEYIEDLHAYYRKIEYLGCVSPTYMDEQLDLNERMRAILVDWLIEVHDKFDLMQETLFLTVNLIDRFLAKQNVVRKKLQLVGLVAMLLACKYEEVSVPVVSDLIHIADRAYTRKDILEMEKLMLNTLQYNMSLPTAYVFMRRFLKAAQADKKLELVAFFLVDLSLVEYEMLKFPPSLVAAAAVYTAQCTVSGFKHWNKTCEWHTNYSEDQLLECSMLMVGFHQKAGAGKLTGVHRKYGSAKFSFTAKCEPACFLLENKNQP

SEQ ID NO: 7443 - DNA, 1305 bp, Medicago varia
  CDS (1)..(1305)
atggtgaatacttctgaagagaacaattccaacgcagttatgccaagaaaatttcaaggaggaatgaatcaagtgggtcatggtggtggaagaattgttgggcagaacagaagagctttaggagggatcaatcagaattttgtgcatggtcgaccttacccttgtgttgtacacaagagggtgttgtctgaaaaacatgagatttgtgaaaagaaacaggctgatctgggacatagacccatcacaaggaggtttgctgcaaaaattgctggctcacagcaatcctatgctgagaaaaccaagaattcaaatccattgaatttgaatgagtttggaaactccatagccattgatgatgaactcaagtcaccagaagaccaaccagagcctatgactttggagcatactgaaccaatgcatagtgatccacttgagatggaagaggttgagatggaggatatagagggagagatgattttggacattgatagctgtgatgcaaacaattctcttgctgttgtggagtatattgaagatctccatgcttactacagaaagattgagtatcttggctgtgtttcaccaacctacatggatgaacaacttgacctcaatgagaggatgagggctatactagttgactggctgattgaggttcatgacaaattcgacctcatgcaagagacactgtttcttacagttaatctcatcgacagattcttggctaagcagaatgttgtaagaaagaaacttcagctggttggtcttgttgccatgcttttggcatgcaagtatgaggaagtttctgtgcctgtcgtttcggatctgatccatatagctgacagagcttacacaaggaaagacattctcgaaatggagaagttgatgctcaacactctgcagtataacatgtctcttccaactgcttatgttttcatgagaaggtttctgaaggctgctcaagctgacaaaaaacttgagctggtggcttttttcttggttgacctatctctggtggaatatgagatgctgaagtttccaccatccttggttgctgctgctgctgtctacacagctcaatgcactgtcagtggtttcaaacactggaacaagacatgtgagtggcacacaaactactcagaagatcagctgttggagtgctctatgctgatggttggattccaccagaaagccggagccgggaaactgacaggagtgcataggaagtatggctcagcaaaatttagcttcactgctaaatgtgaaccagcatgttttcttctggagaacaagaaccagccataa

SEQ ID NO: 7444 - protein, 434 aa, Medicago varia
MVNTSEENNSNAVMPRKFQGGMNQVGHGGGRIVGQNRRALGGINQNFVHGRPYPCVVHKRVLSEKHEICEKKQADLGHRPITRRFAAKIAGSQQSYAEKTKNSNPLNLNEFGNSIAIDDELKSPEDQPEPMTLEHTEPMHSDPLEMEEVEMEDIEGEMILDIDSCDANNSLAVVEYIEDLHAYYRKIEYLGCVSPTYMDEQLDLNERMRAILVDWLIEVHDKFDLMQETLFLTVNLIDRFLAKQNVVRKKLQLVGLVAMLLACKYEEVSVPVVSDLIHIADRAYTRKDILEMEKLMLNTLQYNMSLPTAYVFMRRFLKAAQADKKLELVAFFLVDLSLVEYEMLKFPPSLVAAAAVYTAQCTVSGFKHWNKTCEWHTNYSEDQLLECSMLMVGFHQKAGAGKLTGVHRKYGSAKFSFTAKCEPACFLLENKNQP

SEQ ID NO: 7445 - DNA, 1194 bp, Mesocricetus auratus
  CDS (1)..(1194)
atggcgctgctccgacgcccgacggtgtccagtgatttgaagaatattgacacaggagttaatcctaaagctaagagccatgtgaccattcggcgggcagttttagaagaaattggaaataaagttagaagccgagcagccccagtggctaagaaacctcagaacaccaaaataccagttcagcccaccaaagtgacacatgtcaacaaacagccgaaacctacagcctctgtgaaaccggtacagatggagaccctggctcccaaggatcctcctgcccctgaggatgtctccatgaaggaagagaacctctgccaagctttctctgatgctttgctctgcaagatcgaggatatagataacgaagactgggagaaccctcagctctgcagcgactacgtgaaggacatctaccagtatctcaggcagcttgaggttttgcagtccatcaacccacatttcttagatggaagagatataaatggacgtatgcgtgccatcctggtggactggctggtccaagtccattccaagtttaggcttctgcaggaaactctttacatgtgcattgccatcatggaccggttcctacaggcgcagccggtctgccggaagaagctgcagctggttgggatcacggctctgctcttggcttccaaatacgaggagatgttttctccaaatatcgaagactttgtttatatcacagacaatgcttacaccagttcccaaatccgagaaatggagactctgattttgaaagagctaaaatttgagttgggtcggcctttgccgctccacttcttaaggcgagcctcaaaggctggggaggtggacgtggaacaacacacgctagccaagtatctgatggagctaacgctcatcgactatgacatggtgcactatcacccttctcaggtcgcagcggctgcttcctgcctttctcagaaggtgctgggccagggcaaatggaatttaaagcagcagtattacaccggatacatggagactgaagtactggaagtcatgcagcacatggccaagaacgtggtgaaagtcaacgaaaacctcaccaagttcatcgctgtcaagaacaagtatgccagcagcagactcctgaagatcagcacgatcccacagctgaactccaaaaccatcaaagaccttgcctcccctctgatgggcaggctctag

SEQ ID NO: 7446 - protein, 397 aa, Mesocricetus auratus
MALLRRPTVSSDLKNIDTGVNPKAKSHVTIRRAVLEEIGNKVRSRAAPVAKKPQNTKIPVQPTKVTHVNKQPKPTASVKPVQMETLAPKDPPAPEDVSMKEENLCQAFSDALLCKIEDIDNEDWENPQLCSDYVKDIYQYLRQLEVLQSINPHFLDGRDINGRMRAILVDWLVQVHSKFRLLQETLYMCIAIMDRFLQAQPVCRKKLQLVGITALLLASKYEEMFSPNIEDFVYITDNAYTSSQIREMETLILKELKFELGRPLPLHFLRRASKAGEVDVEQHTLAKYLMELTLIDYDMVHYHPSQVAAAASCLSQKVLGQGKWNLKQQYYTGYMETEVLEVMQHMAKNVVKVNENLTKFIAVKNKYASSRLLKISTIPQLNSKTIKDLASPLMGRL

SEQ ID NO: 7447 - DNA, 1197 bp, Mus musculus
  CDS (1)..(1197)
atggcgctgctccgacgcccgacggtgtccagtgatttgaagaatattgacacagaagttattcctaaagccaagagccatgtgactatccggcgggcagttttagaagaaattggaaataaagttagaaacagaaccactcaggtggcgaagaaacctcagaacaccaaagtaccagctctgtccaccaaagtgacaaatgtcaacaagcagccgaaacccacagcctctgtgaaaccagtgcagatggaggcgctagctcccaaggatcgtcctcccgcccctgaggatgtctccatgaaggaagagagcctctgccaagctttctctgatgctctgctctgcaagatcgaggacatagataacgaggacagggagaaccctcagctctgcagtgactacgtgaaggacatctaccagtacctcaggcagcttgaggttttacagtccattaatccacacttcttagatggaagagatataaatggacgtatgcgtgccatcctggtggactggctggtccaagtccattccaagtttcggcttctgcaggaaactctgtacatgtgcattggcatcatggaccggttcctgcaggctcagctggtctgccggaagaaactgcaggtggtcgggatcacagctctgctcctggcttccaaatatgaggagatgttttctccaaatatcgaagactttgtttatatcacagataatgcttacaccagttcccaaatccgagaaatggagactctgattttgaaagagttgaaatttgagttgggccgacctttgccacttcacttcttaaggcgagcctcaaaagccggagaggtggatgttgaacagcacactttagccaagtacctgatggagctgacgctcgtcgactatgacatggtgcactaccatccttctcaggtggcagccgctgcctcttgcctgtctcagaaggtgctgggccaaggaaaatggaatttgaagcagcagtattacacaggctacatggagagtgaagtcctggaagtcatgcagcacatggccaagaacgttgtgaaagtcaatgacaaccgtaccaagttcatcgctgtcaagaacaagtatgccagcagcagactcctgaagatcaagcacgatcctcagctgaactccaaaatcatcaaagacctggtctcccctctgctgggcagcccctag

SEQ ID NO: 7448 - protein, 398 aa, Mus musculus
MALLRRPTVSSDLKNIDTEVIPKAKSHVTIRRAVLEEIGNKVRNRTTQVAKKPQNTKVPALSTKVTNVNKQPKPTASVKPVQMEALAPKDRPPAPEDVSMKEESLCQAFSDALLCKIEDIDNEDRENPQLCSDYVKDIYQYLRQLEVLQSINPHFLDGRDINGRMRAILVDWLVQVHSKFRLLQETLYMCIGIMDRFLQAQLVCRKKLQVVGITALLLASKYEEMFSPNIEDFVYITDNAYTSSQIREMETLILKELKFELGRPLPLHFLRRASKAGEVDVEQHTLAKYLMELTLVDYDMVHYHPSQVAAAASCLSQKVLGQGKWNLKQQYYTGYMESEVLEVMQHMAKNVVKVNDNRTKFIAVKNKYASSRLLKIKHDPQLNSKIIKDLVSPLLGSP

SEQ ID NO: 7449 - DNA, 1167 bp, Oryzias curvinotus
  CDS (1)..(1167)
atgtcgtctgtggaagttgttgcgcagcagcagcagctcctggccgcagagcaccctcggaggatggggaaaggagccgcagcggatcccaggagagctgctttgggagaactgaccaacttgaacgcagttgcagccaccaacgggaaagtgggaccatccaaaaaaccctcgaaggcctcctgtgttcagaaacccaaacctcctcagttggtggctcccatgatccagacgggtgcggctgcctcagctcccgtctcggctaaaccctgcgtgaaggaggagcagctctgccaggctttctcggaggtgctgctcgctgtgcaggacgtggacgagcaggatgcagaccagcctcagttgtgctcccaatatgtcaaggacatctacaagtatctgcacgtcctggaggagcagcagcctgtgcgtgccaactacatgcaaggctacgaagtcactgagcgcatgagggcactcctcgttgactggcttgtccaagtccactccaggttccagctgctgcaggagaccctgtacctcactgtggccatcctggacccgttcctgcaggtccacccggtgagccgtcggaagctgcagcttgtcggcgtcacggccatgctggtggcctgcaagtatgagaagatgtacgctcctgaagtgggggacttctcctacatcacagacaacgccttcacaaagtctcagattgtggagatggagcaggtgatcctcaggagcctcagcttccagctgggccgccccctcccgctccacttcctcaggcgagccagcaaagttgccggcgctgacgtggagaagcacactctggcaaagtacctgatggagctgaccctgctggactaccacatggtgcattaccggccctccgaggttgccgctgcagcgctgtgtctgtctcagctgctgctcgatgggctgccatggtcgctcacgcagcagcagtattccacctacgaagagcagcatctaaaacccatcatgcagcacatcgccaagaacgtggtgctggtgaacgagggcagaacaaagttcctggcggtgaagaagaagtactccagcagcaagctgatgaagatcagcctcattcctcagctcaactcttcaacggtcaaggccttggcggagtctctgctcaatccctga

SEQ ID NO: 7450 - protein, 388 aa, Oryzias curvinotus
MSSVEVVAQQQQLLAAEHPRRMGKGAAADPRRAALGELTNLNAVAATNGKVGPSKKPSKASCVQKPKPPQLVAPMIQTGAAASAPVSAKPCVKEEQLCQAFSEVLLAVQDVDEQDADQPQLCSQYVKDIYKYLHVLEEQQPVRANYMQGYEVTERMRALLVDWLVQVHSRFQLLQETLYLTVAILDPFLQVHPVSRRKLQLVGVTAMLVACKYEKMYAPEVGDFSYITDNAFTKSQIVEMEQVILRSLSFQLGRPLPLHFLRRASKVAGADVEKHTLAKYLMELTLLDYHMVHYRPSEVAAAALCLSQLLLDGLPWSLTQQQYSTYEEQHLKPIMQHIAKNVVLVNEGRTKFLAVKKKYSSSKLMKISLIPQLNSSTVKALAESLLNP

SEQ ID NO: 7451 - DNA, 1149 bp, Oryzias javanicus
  CDS (1)..(1149)
atgtcgtctgtggaagcggttacgcagcagcagctcctggccgcagagaatcctgtgaggatgggtaaaggcgccgcggaccccaggagagctgctttgggagaaatcaccaaccggaacgcggctgcagccgccaacaggaaaatgggaccatcaaaaaaacaacccaagccctcctgtgctcagaagccccagcctgtggtccacaccagtgccggcgacccagctcccatctcggctgacatgtctatgaaagtggagcaggatctctcccaggctttctctgaggtgctcatgctggctgtccaggacgtggacgagcaggatgcagaccagcctcagctctgctctcagtatgtcaaggatatctacaagtatctgcacaccctggaggagcagcaggctatacgtcccaactacatgcaaggctacagtgtcactgagcacatgagggcgctcctcgttgactggcttgtccaagtccactccaggttccagctgctgcaggagaccctgtacctcactgtggccatcctggaccgcttcctgcaggtccacccggtgagtcgtcggaagctgcagctcgtcggcgtcacagccatgctggtggcgtgcaagtatgaggagatgtatcctcctgaagtcggggactttgcctacatcacagacgacgccttcacaaagtttcagatcgtggagatggagcaggtgatcctcaggagcctgggcttccagctgggccggcccctcccgctccacttcctcaggcgagcctccaaggtggccgatgctgacgtggagaagcacactctggctaagtacctgctggagctgaccctcctggactaccacatggtacactaccggccctcggaggccgctgctgcagcgctgtgtctctctcagctgctgctcgatgggctgccatggtcgctcgagcagcaacactactccacctatgacgagcagcacctgaaacccatcatgcagctcatggccaagaatgttgtgcaggtgactgaaggcagaacgaagttcctggcagtgaagaagaaatactccagcagcaaactgatgaagatcagcctcatccctcagctcaactcttcaacgataaaggtcatggcagaggctctgcagaatccatga

SEQ ID NO: 7452 - protein, 382 aa, Oryzias javanicus
MSSVEAVTQQQLLAAENPVRMGKGAADPRRAALGEITNRNAAAAANRKMGPSKKQPKPSCAQKPQPVVHTSAGDPAPISADMSMKVEQDLSQAFSEVLMLAVQDVDEQDADQPQLCSQYVKDIYKYLHTLEEQQAIRPNYMQGYSVTEHMRALLVDWLVQVHSRFQLLQETLYLTVAILDRFLQVHPVSRRKLQLVGVTAMLVACKYEEMYPPEVGDFAYITDDAFTKFQIVEMEQVILRSLGFQLGRPLPLHFLRRASKVADADVEKHTLAKYLLELTLLDYHMVHYRPSEAAAAALCLSQLLLDGLPWSLEQQHYSTYDEQHLKPIMQLMAKNVVQVTEGRTKFLAVKKKYSSSKLMKISLIPQLNSSTIKVMAEALQNP

SEQ ID NO: 7453 - DNA, 1164 bp, Oryzias latipes
  CDS (1)..(1164)
atgtcgtctgtggaaattgttgcgcagcagctcctggccgcagagcaccctcggaggatggggaaaggagctgcagcggatcccaggagagctgctttgggagaactgaccaacttgaacgcagctgcagccaccaacgggaaagtgggaccagcaaaaaaacccttgaaggcctcctgtgctcagaaacccaaacttactcagttggtggcttccatgatccagacgggtgcggctgcctcagctcccgtcttagctaaacccagcgtgaaggaggagcaggagctctgccaggctttctcggaggtgctgctcgctgtgcaggacgtggacgagcaggatgcagaccagcctcagttatgctcccaatatgtcaaggacatctacaagtatctgcacatcctggaggagcagcagcctgtgcgtgccaactacatgcaaggctacgaagtcactgagcgcatgagggcactcctcgttgactggcttgtccaagtccactccaggttccagctgctgcaggagaccctgtacctcactgtggccatcctggaccgcttcctgcaggtccacccggtgagccgtcggaagctgcagctcgtcggcgtcacagccatgctggtggcctgcaagtatgaggagatgtacgctcctgaagtgggggactttgcctacatcacagacaacgccttcacaaaatctcagattgtggagatggagcaagtgatcctcaggagcctcagcttccagctgggccgccccctcccgctccacttcctcaggcgagccaccaaagttgccggcgctgacgtggagaagcacactctggcaaagtacctgatggagctgaccctcctggactaccacatggtgcattaccggccctctgaggttgctgctgcagcgctgtgtctgtctcagctgctgctcgatgggctgccatggtcgctcacacagcagcagtattccacctacgaagagcagcatctaaaacccatcatgcagcacatggccaagaacgtggtgctggtgaacgagggcagaacaaagttcctggcggtgaagaagaagtactccagcagcaaactgatgaagatcagcctcattcctcagctcaactcttcaacagtcaagaccatggcggatgctctgcacgatcactga

SEQ ID NO: 7454 - protein, 387 aa, Oryzias latipes
MSSVEIVAQQLLAAEHPRRMGKGAAADPRRAALGELTNLNAAAATNGKVGPAKKPLKASCAQKPKLTQLVASMIQTGAAASAPVLAKPSVKEEQELCQAFSEVLLAVQDVDEQDADQPQLCSQYVKDIYKYLHILEEQQPVRANYMQGYEVTERMRALLVDWLVQVHSRFQLLQETLYLTVAILDRFLQVHPVSRRKLQLVGVTAMLVACKYEEMYAPEVGDFAYITDNAFTKSQIVEMEQVILRSLSFQLGRPLPLHFLRRATKVAGADVEKHTLAKYLMELTLLDYHMVHYRPSEVAAAALCLSQLLLDGLPWSLTQQQYSTYEEQHLKPIMQHMAKNVVLVNEGRTKFLAVKKKYSSSKLMKISLIPQLNSSTVKTMADALHDH

SEQ ID NO: 7455 - DNA, 1161 bp, Oryzias luzonensis
  CDS (1)..(1161)
atgtcgtctgtggaagttgttgcgcagcagctcctggccgcagagcaccctcggaggatggggaaaggagccgcagcggatcccaggagagctgctttgggagaactgaccaacttgaacgcagttgcagccaccaacgggaaagtgggaccatccaaaaaaccctcgaaggcctcctgtgctcagaaacccaaacctacagagttggtggctcccatgatccagacgggtgcggctgcctcagctcccgtctcagctaaaccctgcgtgaaggaggagcagctctgccaggctttctcggaggtgctgctcgctgtgcaggatgtggacgagcaggatgcagaccagcctcagttgtgctcccaatatgtcaaggacatctacaagtatctgcacgtcctggaggagcagcagcctgtgcgtgccaactacatgcagggctacgaagtcactgagcgcatgagggcactcctcgttgactggcttgtccaagtccactccaggttccagctgctgcaggagaccctgtacctcactgtggccatcctggaccgcttcctgcaggtccacccggtgagccgtcgaaagctgcagctcgtcggcgtcacggccatgctggtggcctgcaagtatgaggagatgtacacccctgaagtggcagacttttcctacatcacagacaacgccttcacaaagtctcagattgtggagatggagcaggtgatcctcaggagcctcagcttccagctgggccgccccctcccgctccacttcctcaggcgagccaccaaagttgccggcgctgacgtggagaagcacactctggcaaagtacctgatggagctgaccctgctggactaccacatggtgcattaccggccctcggaggttgccgctgcagcgctgtgtctgtctcagctgctgctcgatgggctgccatggtcgctcacgcagcagcagtattccacctacgaagagcagcatctaaaacccatcatgcggcacatcgccaagaacgtggtgctggtgaacgagggcagaacaaagttcctggcggtgaagaagaaatactccagcagcaagctgatgaagatcagcctcattcctcagctcaactcttcaactgtcaaggccatggcggagtctctgcacaatccctga

SEQ ID NO: 7456 - protein, 386 aa, Oryzias luzonensis
MSSVEVVAQQLLAAEHPRRMGKGAAADPRRAALGELTNLNAVAATNGKVGPSKKPSKASCAQKPKPTELVAPMIQTGAAASAPVSAKPCVKEEQLCQAFSEVLLAVQDVDEQDADQPQLCSQYVKDIYKYLHVLEEQQPVRANYMQGYEVTERMRALLVDWLVQVHSRFQLLQETLYLTVAILDRFLQVHPVSRRKLQLVGVTAMLVACKYEEMYTPEVADFSYITDNAFTKSQIVEMEQVILRSLSFQLGRPLPLHFLRRATKVAGADVEKHTLAKYLMELTLLDYHMVHYRPSEVAAAALCLSQLLLDGLPWSLTQQQYSTYEEQHLKPIMRHIAKNVVLVNEGRTKFLAVKKKYSSSKLMKISLIPQLNSSTVKAMAESLHNP

SEQ ID NO: 7457 - DNA, 1260 bp, Oryza sativa
  CDS (1)..(1260)
atggagaacatgagatctgagaactttaaccaaggtgtttcaatggagggcgtcaagcatgcgcccgagatggcaaacaccaacaggagggctctgcgggacatcaagaacatcatcggagcacctcaccagcacatggctgtgagcaagaggggtttgctagataaacctgccgctaagaaccaatctggacaccgtcctatgacgaggaaatttgctgcaacactggcaaaccaaccctccattgctcccctggcacccattggaagtgagaggcaaaaaaggacagcagattctgcatttcatggtccagcagatatggagtgcaccaagatcacatctgatgatttgccattgccaatgatgtctgagatggacgaagtgatgggttctgaactgaaagaaattgagatggaagacattgaggaggcagcacctgatattgacagctgtgatgcaaataactcccttgcagtagttgaatatgttgatgaaatttacagcttctacaggaggagtgagggtttgagctgtgtctctcctaattacatgttgagccaaaatgacataaatgagaagatgcgcggcattctcatcgattggctgatagaggtgcattacaagttagagctattggatgagaccctcttccttactgtgaatatcatagaccgattcttggctcgcgaaaatgtggtgcgaaagaagcttcagttggttggcgtgactgccatgctgctcgcctgcaagtatgaagaagtgagcgttcctgtagtggaggatcttatcctaatctgcgaccgcgcctacacaagaacagatattctcgaaatggagaggatgattgtaaacactcttcagtttgatatgtcagttccaactccatactgtttcatgagaaggttcctcaaggctgcacaatctgacaagaagcttgagctcatgtctttcttcataattgagctgagccttgtcgagtatgagatgctcaaattccagccgtcaatgctggcggctgctgccatctacactgctcagtgcaccattaatgggttcaagtcctggaacaaatgctgtgagctgcatacaaaatactctgaagaacagctgatggagtgctccaagatgatggttgagctccaccaaaaagcaggacatgggaagcttactggagttcatagaaagtacagcacatttaggtatggttgccccgcaaaatcggagcccgccgtcttcttgctcaagagcgtggcactgtaa

SEQ ID NO: 7458 - protein, 419 aa, Oryza sativa
MENMRSENFNQGVSMEGVKHAPEMANTNRRALRDIKNIIGAPHQHMAVSKRGLLDKPAAKNQSGHRPMTRKFAATLANQPSIAPLAPIGSERQKRTADSAFHGPADMECTKITSDDLPLPMMSEMDEVMGSELKEIEMEDIEEAAPDIDSCDANNSLAVVEYVDEIYSFYRRSEGLSCVSPNYMLSQNDINEKMRGILIDWLIEVHYKLELLDETLFLTVNIIDRFLARENVVRKKLQLVGVTAMLLACKYEEVSVPVVEDLILICDRAYTRTDILEMERMIVNTLQFDMSVPTPYCFMRRFLKAAQSDKKLELMSFFIIELSLVEYEMLKFQPSMLAAAAIYTAQCTINGFKSWNKCCELHTKYSEEQLMECSKMMVELHQKAGHGKLTGVHRKYSTFRYGCPAKSEPAVFLLKSVAL

SEQ ID NO: 7459 - DNA, 1179 bp, Rana japonica
  CDS (1)..(1179)
atggctactcgccgggctgctattgcacgtgaagttgacaatgctgttggggcgatgagatcaaaggcccagctgaatggtagaagagctgctctgggagaaatcggtaacaaggtgacagtgcgagctgtaaagcagcctgccaagaactcaaataccacatcaaagactacaaggcctgttgccaaagtatcaaatgtgagtgtgaagccaaaggctgtgacggtgactgaggccccctcacaagtaaaagaagcctctccagttcctatggatgtgtcaatgaaggaagaagaggaactgtgtcaagctttctcagaggtcctaaaccatgtggtagacattgatgctgaagatggtggtaatccacagctctgcagcgagtatgtcgtggatatctacaactacttgagagagcgggaggtccagcagtccataaaacaaagatatctggatggaatggagattaatgaacgcatgagagccatcctggttgactggctgatccaggttaactccaggttccagtttcttcaggaaactctatacatgggcattgccatcatggatcgctttcttcaagttcagcctatctcacgtggcaaacttcagctggttggtgtgacttcactcttgttggcttcaaaatatgaagagatgtatagtccagaagttgcagactttgcttatatcacagacaatgcttacacaacatcccagattagagaaatggagatgattatccttcgtgagctcaaatttgacttgggacggccacttccccttcacttccttcgacgtgcatcaaaggcatgcagtgctgatgcagagcagcacacactagcaaagtacctaatggagcttacccttgttgactatgaaatggtccattttcatccttctgagattgccgctgctgcactttgcttggctcaaaaggtccttggagttggcagctgggggtccacacagcaccactacacgggctacacagaggaagatctgactccaatcataaagcatatcgctaaaaatgtaaccaaagtcaaccagaatcggacaaagcacgtggctgtgaggaataagtacgccagcagcaagctgatgaaaatcagtacacatccccagctgatgtctctggttattacagaactggctgcaagtctaacttcccagtga

SEQ ID NO: 7460 - protein, 392 aa, Rana japonica
MATRRAAIAREVDNAVGAMRSKAQLNGRRAALGEIGNKVTVRAVKQPAKNSNTTSKTTRPVAKVSNVSVKPKAVTVTEAPSQVKEASPVPMDVSMKEEEELCQAFSEVLNHVVDIDAEDGGNPQLCSEYVVDIYNYLREREVQQSIKQRYLDGMEINERMRAILVDWLIQVNSRFQFLQETLYMGIAIMDRFLQVQPISRGKLQLVGVTSLLLASKYEEMYSPEVADFAYITDNAYTTSQIREMEMIILRELKFDLGRPLPLHFLRRASKACSADAEQHTLAKYLMELTLVDYEMVHFHPSEIAAAALCLAQKVLGVGSWGSTQHHYTGYTEEDLTPIIKHIAKNVTKVNQNRTKHVAVRNKYASSKLMKISTHPQLMSLVITELAASLTSQ

SEQ ID NO: 7461 - DNA, 1179 bp, Xenopus laevis
  CDS (1)..(1179)
atggctactcgtcgcgctgctattccccgtgaagcggataatatccttgggggtgcaatgcgatccaaagttcaaatgaatagcagacgagctgctttgggagagattggcaacaaagtgactgtgcgaggaaaaccacctgcagtaaagcagtcttccaatgctgtggcaaagccttcaaagatggcagcaactaaagtggcaaatgttaagactaagcatgtacctgtgaaaccagttgtagctgaagctgcccccaaagtgccttcccctgtgccgatggatgtgtccttgaaagaggaagagctgtgccaggcattctccgatgcactgaccagtgttgaagacattgatgcagatgatggtggaaaccctcaattgtgcagtgactatgtgatggacatctataactaccttaagcaactggaagttcaacagtctgtacatccttgctatcttgaaggaaaagaaattaatgagcgtatgagagctatcctagttgactggcttgttcaagtgcattctaggtttcagcttcttcaggagactttatacatgggcgttgcaatcatggatcgcttcttacaagttcagccagtctcccgcagtaagcttcagttggttggtgttacttccctactaattgcttcaaaatatgaagagatgtacactccagaggttgcagactttgtttatatcaccgataatgcctatactgcatctcagatcagagaaatggaaatgattatccttcgactcctcaactttgaccttggacggccattacctctccacttcctcagacgggcttcaaaatcttgcagtgctgatgcagagcaacatacccttgcaaaatatttgatggagcttacactcatagactatgaaatggtccacatcaagccttcagaaattgcagctgctgccctctgcctatctcaaaaaattcttggccagggaacctggggtaccactcagcactattacacaggctacacagaaggtgacttgcaactgatcatgaagcatatggctaagaacataaccaaagtcaaccagaatctaacaaagcatgtggctgtgaggaacaagtatgctagcagtaaactgatgaagatcagcacccttcctcagcttatggctcctctaatcacagagcttgctgcaagtctctcttag

SEQ ID NO: 7462 - protein, 392 aa, Xenopus laevis
MATRRAAIPREADNILGGAMRSKVQMNSRRAALGEIGNKVTVRGKPPAVKQSSNAVAKPSKMAATKVANVKTKHVPVKPVVAEAAPKVPSPVPMDVSLKEEELCQAFSDALTSVEDIDADDGGNPQLCSDYVMDIYNYLKQLEVQQSVHPCYLEGKEINERMRAILVDWLVQVHSRFQLLQETLYMGVAIMDRFLQVQPVSRSKLQLVGVTSLLIASKYEEMYTPEVADFVYITDNAYTASQIREMEMIILRLLNFDLGRPLPLHFLRRASKSCSADAEQHTLAKYLMELTLIDYEMVHIKPSEIAAAALCLSQKILGQGTWGTTQHYYTGYTEGDLQLIMKHMAKNITKVNQNLTKHVAVRNKYASSKLMKISTLPQLMAPLITELAASLS

SEQ ID NO: 7463 - DNA, 1230 bp, Arbacia punctulata
  CDS (1)..(1230)
atggctcttggaacaagaaatatgaacatgaatctccatggtgagagcaaacacacattcaacaatgaaaatgtcagtgcaaggctcgggggaaagagcattgctgtgcaaaagccagcacaacgggcagcccttggcaacatcagtaatgtggttcgaactgctcaggcaggaagcaagaaggttgtgaaaaaggacacgagacaaaaggctatgaccaagacaaaggccacatcgtctctccatgctgttgttggtctccctgtagaagatctccctacagagatgaggtcaacatcaccagatgtcctagatgctatggaggttgatcaagcaattgaagccttttcgcaacaattgatagcgctccaggtagaggacattgacaaagatgatggggataacccgcaactgtgcagcgagtatgccaaggacatctacctgtacctacggaggctagaggtggagatgatggtgcctgcaaactacctggaccggcaggagacacagatcaccgggcgtatgcggctgattcttgtggactggcttgtccaagtgcacctccgcttccacctcctgcaagaaaccctgttcctcaccgtccagctgatcgacagatttcttgctgaacattcggtgtcgaaaggaaagctgcagcttgttggagtgacggctatgttcattgccagcaaatacgaagagatgtaccctccagaaatcaacgactttgtctacatcacagacaatgcctacaccaaggcccagatcaggcaaatggaaattgccatgctcaaaggactcaagtataagctgggaaagccgctgtgccttcacttccttcgacgcaactctaaagcagctggggtggatgcccagaagcacacactagccaagtacctaatggagatcacccttccagagtacagcatggtgcaatacagcccttcagagattgcagcagcagccatctacctgtccatgacgcttctggatcccgaaactcacagctcctggtgccccaagatgacccactacagcatgtacagcgaggatcacctcaggccaattgtgcaaaagattgtccagattctgctccgggacgactctgcatctcagaagtactcggctgtgaagacgaaatatggcagcagcaagttcatgaagatcagtggcattgcacagctggactcatctctactcaaacaaatagcgcaaggatcaaatgagtga

SEQ ID NO: 7464 - protein, 409 aa, Arbacia punctulata
MALGTRNMNMNLHGESKHTFNNENVSARLGGKSIAVQKPAQRAALGNISNVVRTAQAGSKKVVKKDTRQKAMTKTKATSSLHAVVGLPVEDLPTEMRSTSPDVLDAMEVDQAIEAFSQQLIALQVEDIDKDDGDNPQLCSEYAKDIYLYLRRLEVEMMVPANYLDRQETQITGRMRLILVDWLVQVHLRFHLLQETLFLTVQLIDRFLAEHSVSKGKLQLVGVTAMFIASKYEEMYPPEINDFVYITDNAYTKAQIRQMEIAMLKGLKYKLGKPLCLHFLRRNSKAAGVDAQKHTLAKYLMEITLPEYSMVQYSPSEIAAAAIYLSMTLLDPETHSSWCPKMTHYSMYSEDHLRPIVQKIVQILLRDDSASQKYSAVKTKYGSSKFMKISGIAQLDSSLLKQIAQGSNE

SEQ ID NO: 7465 - DNA, 1194 bp, Carassius auratus
  CDS (1)..(1194)
atggctcttcgtgtcacaaggaacacccgtctggccagcagcgagaatcagggcgctctgcccgggaaagcagcggtcgcgaacaagcccggactcagacctcgggccgcgctgggggagatcggcaacaatccacagacacgacaggctttgaggaagaaggaagtgaaggttgcacccaaggtggaggctgtggctgagaaggcacctgtggttcaacaacctaaaaaggagtctcctaaagttcagcatgatgtccagattttgtccgagccctcgtctcctgttcccatggagacctctggctgtgcttcggatgatctgtgtcaggcgttctctgatgttatgctcaatatcaaggacgtggatgcagatgactatgataatcccatgctttgcagtgaatatgtcaaggacatctatttgtatctccgtcagcttgagattgagcaagctgttaggccaaagtatctggaaggaagtgaagttacaggaaatatgcgtgcaattctcattgactggcttgtacaagtccaaattaagtttaagctgcttcaggagaccatgtacatgactgttgcagtcattgatcgctttcttcaggatcatccagttccaaagaagcagctccagcttgttggtgtaacagccatgttcattgcctcaaagtatgaagagatgtacccaccagagattgcagactttgcttttgtgactgaccgtgcctacactactggtcagatccgtgatatggagatgaaaatcctcagagtcctcgacttcagttttgggaaacctctgccactacagttcctcaggagagcctccaagattggagacgttactgcagagcatcacacactggccaagtacttcctggagctcaccatggtcgactatgatatggtccactttcctccctctcaggtggctagcgcacgttatgccctaactctgaaggtcttcaactgtggtgactggacccctactcttcagcattatatgggctacactgaggattcactggttcctgtgatgcagcatattgccagaaatgttgtgagagtcaatgaggggctttcaaagcatctggctgtgaagaacaagtactccagtcaaaagcagatgagaattgcttcaatttctcagcttaagtcatccttgatcaaggacctggccaagcaaatctcgtag

SEQ ID NO: 7466 - protein, 397 aa, Carassius auratus
MALRVTRNTRLASSENQGALPGKAAVANKPGLRPRAALGEIGNNPQTRQALRKKEVKVAPKVEAVAEKAPVVQQPKKESPKVQHDVQILSEPSSPVPMETSGCASDDLCQAFSDVMLNIKDVDADDYDNPMLCSEYVKDIYLYLRQLEIEQAVRPKYLEGSEVTGNMRAILIDWLVQVQIKFKLLQETMYMTVAVIDRFLQDHPVPKKQLQLVGVTAMFIASKYEEMYPPEIADFAFVTDRAYTTGQIRDMEMKILRVLDFSFGKPLPLQFLRRASKIGDVTAEHHTLAKYFLELTMVDYDMVHFPPSQVASARYALTLKVFNCGDWTPTLQHYMGYTEDSLVPVMQHIARNVVRVNEGLSKHLAVKNKYSSQKQMRIASISQLKSSLIKDLAKQIS

SEQ ID NO: 7467 - DNA, 1179 bp, Chlorohydra viridissima
  CDS (1)..(1179)
atggctggtgttcagcgaagaatattgatatctcgaaacgaagaaaatcttcttaataaaggaataggtaccaaaaatgtacttggtggcaaaactactagcactagaactgcactctcaaacatttcaaatattcaaagaagacctcaactaggtgggaaagtaaagaaagaagatgtaggtgccttagaagaaaaagctccaacaaataaaagtttagggagaatgatttctcaaactaatctcttaaacgaagttcagatgaaaaaaaatatccagaatcttgaagatatggctgaggtggacctgccaatcaactctatgatagactcctttactgacttggaggtggatgatattgatctagaagatttagggaatccaaccctttgtgctgaatatgttaaagacatctataaatatatgaataaactagagcaaagattagtacctggtgactatatgccaaaccaaactgaaataaattttaaaatgagaagcattttggttgactggttaatccaggtgcagtcaagatttaatcttttgcaagaaactctgtacctcactatctatattttagatagatttctaaataaacaaaatgttaaacgtgccgagcttcaactggttggcgtgacagcgatgttacttgcatctaagtatgaagaaatgtatgctcctgaaattggagattttgtttatataacagacaatgcatattcaaaggaaaagattcgtcagatggagcaaaaaatgttaaaagcttgtgaatatgacttcagtaacccattatgtttgcatttcctgagaagaaattcaaaagcaggagctgttgatgcacaaaaacatactctagctaaatacctcatggagttaacacttgtagaatatgaatttattactaaattaccatctgaagtggctgctgcagcattatatctttcaatgaagctaatagatgattcaaattggacgcctactctagtgcattatagtggttatactgaggatgctattttacctactgttagtaaactttcagtattaacactttctatggacaattcaaaatatcaagctgtaaaaaataaatacgctgcaagtaaattcttacgtattagtcgtatacctcagcttaaaggacacgtactaaataaatttgctgaaagaatttag

SEQ ID NO: 7468 - protein, 392 aa, Chlorohydra viridissima
MAGVQRRILISRNEENLLNKGIGTKNVLGGKTTSTRTALSNISNIQRRPQLGGKVKKEDVGALEEKAPTNKSLGRMISQTNLLNEVQMKKNIQNLEDMAEVDLPINSMIDSFTDLEVDDIDLEDLGNPTLCAEYVKDIYKYMNKLEQRLVPGDYMPNQTEINFKMRSILVDWLIQVQSRFNLLQETLYLTIYILDRFLNKQNVKRAELQLVGVTAMLLASKYEEMYAPEIGDFVYITDNAYSKEKIRQMEQKMLKACEYDFSNPLCLHFLRRNSKAGAVDAQKHTLAKYLMELTLVEYEFITKLPSEVAAAALYLSMKLIDDSNWTPTLVHYSGYTEDAILPTVSKLSVLTLSMDNSKYQAVKNKYAASKFLRISRIPQLKGHVLNKFAERI

SEQ ID NO: 7469 - DNA, 1311 bp, Dictyostelium discoideum
  CDS (1)..(1311)
atgtcaacaattaataaccctctaaatattaaaacaagatcacattcatcaatgggtggaggtatgattatggatgaaaacaaagtaccaaaatcatcaattggtatggataagaaaattggtggtacaactggattaaaatcacacagaggtgccctttctgatttaacaaataatacacatcaaacaactggaatggcaactaaaactgtacaattgtcaaataataatattattatgccacaaccaacaaatactagaaataacattattacaagatcaaaatcaattattgataatggtgcaagtttacgtaattcagcattaattagtggagttttaccaaatgccaatggaccagtaaataaagtacaaaagagagatattcaatcaatggaaatgatgaataatattccccaacaaccagttatgattgacgatgttgataacgataccaatatgattcaagaggaacaaatggtcattgacattacagaggtaccagagaatatcgatatctatgatagccacgatccacaatgtgttggtgaatatgttaatgaaattttcgcatactaccgtgagaaggagcaaatcgataagattgacaaagactatataaagaatcaataccatatcaatgaacgtatgcgtgcaatcctcgtcgattggatgatggctgttcatgtccgtttcaagttgttatctgaaactttcttcctctctgtcaatatcgtcgatcgttatctcgctaaagtaatgattccagtcactaaactccaattggttggtattaccgccattttgttagcttgtaaatatgaagagatctacagtccacaaatcaaggatttcgttcatacatccgatgatgcctgcacccacgccgaggttatcgacatggaaagacaaatcctctcaactttgcaattccacatgtctgtcgccactcctttacactttttacgtcgtttctcaaaggctgctggatcagactctcgtactcattcactcagtaaatacctctctgaactctcaatggttgaatacagaatggttcaattcgttccatcaatgattgccgccgcttcaatctatgtcgctcgtcgtatgaccatgaagtctggtccatactggaatgtaacacttgaatattacacttgttacaaggagtctgaaatcttacaatgtgctcaagaactcaaagaagttagaaagagagctgacacctctaaccttaaagccacaagaaagaaatacttgtcttcaaagttaatggaagtcgctgcaattccagttgttgaattttaa

SEQ ID NO: 7470 - protein, 436 aa, Dictyostelium discoideum
MSTINNPLNIKTRSHSSMGGGMIMDENKVPKSSIGMDKKIGGTTGLKSHRGALSDLTNNTHQTTGMATKTVQLSNNNIIMPQPTNTRNNIITRSKSIIDNGASLRNSALISGVLPNANGPVNKVQKRDIQSMEMMNNIPQQPVMIDDVDNDTNMIQEEQMVIDITEVPENIDIYDSHDPQCVGEYVNEIFAYYREKEQIDKIDKDYIKNQYHINERMRAILVDWMMAVHVRFKLLSETFFLSVNIVDRYLAKVMIPVTKLQLVGITAILLACKYEEIYSPQIKDFVHTSDDACTHAEVIDMERQILSTLQFHMSVATPLHFLRRFSKAAGSDSRTHSLSKYLSELSMVEYRMVQFVPSMIAAASIYVARRMTMKSGPYWNVTLEYYTCYKESEILQCAQELKEVRKRADTSNLKATRKKYLSSKLMEVAAIPVVEF

SEQ ID NO: 7471 - DNA, 1089 bp, Hydra attenuata
  CDS (1)..(1089)
atgagctccagaaccgtactctcaaatatctcaaatatacaaagaagacctcaagttgttggaaaaataaaaaaagaagatggagtcgcactagaggaaaaggctcctttaaataaaggtttagggagaatggtttcacaatctaatcttattagtgatgttcagctaaaaactacaaaaatcattcctgcttaccaagatattgctgatgttgaagttccgataaatgctatgataaactcctttacagagttggaggtagatgatattgatcttgaggacttaggaaatcctactctttgcgctgaatatctaaaagatatatacaagtatatgaataaactagaacgaagattagagcccagtgactatatggctcatcaagctgaaataaattttaaaatgagaagcatattggttgactggctcattcaggtgcaatcaagatttaatcttttgcaagaaactttataccttactatctatattatagatagatatctaagtaaacaaaatgttaagcgtgcggaacttcaattggaaggtgtgacagcaatgttaattgcatcaaaatatgaagaaatgtatgctcctgaaattggagattttgtttatataactgacaatgcttattctaaagaaaaaattcgtcagatggaacaaaaaatgctaaaaacttgtgaatatgatttcagtaatccattatgtttgcattttctgcgaagaaattcaaaagctggagctgtcgatgcacaaaaacatactttagctaaatatctaatggagttaacacttgtggaatatgagtttattactaaactaccctctgaaattgcagctgcagcattatatttagcattaaagctaatagatgattcaaattggacaccaacattagcgcattacagtggttatacagaggatgaaatattatctactgttagtaaactttcgattttaactctttctatggacaattccaaatatcaagccgttaaaaataaatactctgccagtaaattcttacgtattagtcttatacctcagcttaaaggacacattctgagtaaatttgcggaaagaaattag

SEQ ID NO: 7472 - protein, 362 aa, Hydra attenuata
MSSRTVLSNISNIQRRPQVVGKIKKEDGVALEEKAPLNKGLGRMVSQSNLISDVQLKTTKIIPAYQDIADVEVPINAMINSFTELEVDDIDLEDLGNPTLCAEYLKDIYKYMNKLERRLEPSDYMAHQAEINFKMRSILVDWLIQVQSRFNLLQETLYLTIYIIDRYLSKQNVKRAELQLEGVTAMLIASKYEEMYAPEIGDFVYITDNAYSKEKIRQMEQKMLKTCEYDFSNPLCLHFLRRNSKAGAVDAQKHTLAKYLMELTLVEYEFITKLPSEIAAAALYLALKLIDDSNWTPTLAHYSGYTEDEILSTVSKLSILTLSMDNSKYQAVKNKYSASKFLRISLIPQLKGHILSKFAERN

SEQ ID NO: 7473 - DNA, 1167 bp, Marthasterias glacialis
  CDS (1)..(1167)
atgttgaacggcgaaaatgttgactcaaggatcatgggcaaggtggccaccagggcatcctcaaagggagttaagtcaacactgggcacaaggggtgccctggagaacatcagtaacgtagcacgcaataacttgcaagcaggagctaagaaggagctggtaaaagctaaacgtggaatgaccaaatcaaaggctaccagttcactacagtctgtcatggggctcaatgttgaaccaatggaaaaggccaaaccacagtcaccagagcccatggatatgagtgagatcaatagtgcattggaagcattctctcagaacctcttggaaggagtggaagacatcgacaagaatgactttgacaacccacagctctgcagcgagtttgtaaatgacatctatcagtacatgaggaaactggagcgtgaattcaaagtgaggacagactatatgacgatacaggaaatcacagagagaatgcgtagtatcctcatcgactggctggttcaagtacatcttagattccatctactccaagagactctctttctcaccatccaaattctggacagatacctggaggttcaacccgtgtccaaaaataaacttcagttggtcggtgtgacatccatgctgattgcagccaagtatgaggaaatgtacccgccagagattggggactttgtgtacatcacagacaacgcttacaccaaggcacagattcgttccatggagtgcaatatcctcaggaggctagatttcagtctcggtaaaccactctgcattcacttcctcagacgcaactcaaaggctggaggggttgatggtcaaaaacacaccatggccaagtacctgatggagctaacactaccagaatacgcattcgtcccatatgacccatcagagattgctgcagctgccctgtgcttatccagtaagatccttgaaccagacatggaatggggtaccacactagtccattacagcgcatacagtgaagatcacctgatgcctatcgtgcagaagatggctctcgtcctcaagaatgcaccaacagcaaaattccaggccgtcagaaagaagtactcgagcgccaaattcatgaacgtgagcaccatctcagcactgacgtcctccaccgtaatggacctcgctgaccagatgtgctga

SEQ ID NO: 7474 - protein, 388 aa, Marthasterias glacialis
MLNGENVDSRIMGKVATRASSKGVKSTLGTRGALENISNVARNNLQAGAKKELVKAKRGMTKSKATSSLQSVMGLNVEPMEKAKPQSPEPMDMSEINSALEAFSQNLLEGVEDIDKNDFDNPQLCSEFVNDIYQYMRKLEREFKVRTDYMTIQEITERMRSILIDWLVQVHLRFHLLQETLFLTIQILDRYLEVQPVSKNKLQLVGVTSMLIAAKYEEMYPPEIGDFVYITDNAYTKAQIRSMECNILRRLDFSLGKPLCIHFLRRNSKAGGVDGQKHTMAKYLMELTLPEYAFVPYDPSEIAAAALCLSSKILEPDMEWGTTLVHYSAYSEDHLMPIVQKMALVLKNAPTAKFQAVRKKYSSAKFMNVSTISALTSSTVMDLADQMC

SEQ ID NO: 7475 - DNA, 1227 bp, Patella vulgata
  CDS (1)..(1227)
atgactacagttacacgctcttcatcggctaatcttggtgctagtcaaaagttggctgtgaagaaaggtgatgcaatgatgtcgagtaaaggtatttccaaccgaagcaatcggtctgctttaggagacataggaaataaagtttctaatatgactattgacccaacgaaaaaagcattaggcctacctgtaatcaaaaaggagataattcagaaatccaagtttacaagaagtaagactaccgtttcggaatcggatatcttgttacaggagaaagagtctgcctgttgtagtagagcttataccatctttaaagatgccatcgaaccaattgtgtcgactgttgatcttatggacattagtgaagacaaaccagacgccttctccaaagttttattaacagttgaagatattgacgccaacgacaaagataacccccaacttgtcagtgactatgtcaatgatatttaccattacatgagacatttagaggaaacgtttgccgtaaaagctaactttcttgaaggacaagaagtaactggtaaaatgagatcaatcttgattgattggttatgccaagttcatcacagattccatctattacaagaaactttatatttaacggtttctataatagacaggtttttgcaggttcatccgatttctagaaataagttgcagttagttggggttacctcaatgctgcttgcttcaaaatatgaagaaatgtacgcccccgaagtggcggattttgtgtacataacggacaatgcttataccaaagccgatattaggactatggaacaaacaatattaaaaacactagattttagttttggaaagccattgtgtttacattttttacgaaggaattctaaagctggtcaggttgatgcaaccaaacatacacttgccaagtatttaatggaacttaccattatagagtatgatatggtgcattgtaatccatctattatagctgctgcagctttatgtttatctatgaaggtgctagatgattcacaatggtctgaaaccttagctcattacagtaactactcggaaaaagagatttatccagtaatgcagaaattagctcagttggtggttaaagcagaaactagtaaattaacggctgtaaagataaaatattccagttcaaggtttatgaaaatcagttccattccagaattgaaatctaatgctataacggatctcgtattatag

SEQ ID NO: 7476 - protein, 408 aa, Patella vulgata
MTTVTRSSSANLGASQKLAVKKGDAMMSSKGISNRSNRSALGDIGNKVSNMTIDPTKKALGLPVIKKEIIQKSKFTRSKTTVSESDILLQEKESACCSRAYTIFKDAIEPIVSTVDLMDISEDKPDAFSKVLLTVEDIDANDKDNPQLVSDYVNDIYHYMRHLEETFAVKANFLEGQEVTGKMRSILIDWLCQVHHRFHLLQETLYLTVSIIDRFLQVHPISRNKLQLVGVTSMLLASKYEEMYAPEVADFVYITDNAYTKADIRTMEQTILKTLDFSFGKPLCLHFLRRNSKAGQVDATKHTLAKYLMELTIIEYDMVHCNPSIIAAAALCLSMKVLDDSQWSETLAHYSNYSEKEIYPVMQKLAQLVVKAETSKLTAVKIKYSSSRFMKISSIPELKSNAITDLVL

SEQ ID NO: 7477 - DNA, 1287 bp, Spisula solidissima
  CDS (1)..(1287)
atgactacaagagccgcttcggcgaatcttgctaatgcaagaatgatgcataatatggaggaagctggccacatggctaacctcaaaggtagaccacacacgtcacatgcctcccagagaaacactttgggggatattggcaatcaagtgtccgccatcacaatatcagatgtcccacggaaggatcccatcatcaagaaagaaatagttcatttatctagtcaccaacacaagatactaacaaagagcaaagctaccacatcattaaaaagtttagcagaagaaagtcatatacctaagaaacaagaagcatttacttttttggaacctgttgctgccatgccaaagccaaccacagtgcctactgcaacagtacttccacaaccaacagtcccggttcctatggatataagtgaaaatgttccagaatcgttctccagagttttgctcaatgtacaaaatatagatgcaaatgacaaagaaaacccacaactagtcagtgaatatgtcaatgacatctacgattacatgagagatttagagggaaaatatcctatacgacataattatttagaaaatcaagaaatcacaggaaagatgcgtgcaattttaatagattggttatgtcaggtgcatcatagattccacttgttacaagagacactttacctcacagtagccattatagacagattgttacaggaaagcccagtgcctagaaataaactacaattagtcggagttacttctatgttaatagcttccaaatatgaagaaatgtatgcacctgaagttgcagactttgtgtatataactgacaatgcttatacgaaaaaagaaatcttagaaatggaacaacatatacttaaaaaattaaacttcagttttggtcgaccactttgtctgcatttcttacggagagattcaaaagctggccaggttgatgccaacaaacacacgttagcaaagtatcttatggagctgactatcacagagtatgatatggtgcaatatctaccttcaaaaatagctgctgcagccctgtgtctttctatgaaacttcttgatagtactcattggacggagacattaacacactacagttcatattgtgaaaaggatttggtgtcaacaatgcagaaacttgccagtctagtcattaaagcagagaacagcaaactcactgctgttcatacaaagtactcaagctctaaatttatgaagatcagtaaattagctgccttgaaatctccattggttaaagaattggcagctgcctcagtatga

SEQ ID NO: 7478 - protein, 428 aa, Spisula solidissima
MTTRAASANLANARMMHNMEEAGHMANLKGRPHTSHASQRNTLGDIGNQVSAITISDVPRKDPIIKKEIVHLSSHQHKILTKSKATTSLKSLAEESHIPKKQEAFTFLEPVAAMPKPTTVPTATVLPQPTVPVPMDISENVPESFSRVLLNVQNIDANDKENPQLVSEYVNDIYDYMRDLEGKYPIRHNYLENQEITGKMRAILIDWLCQVHHRFHLLQETLYLTVAIIDRLLQESPVPRNKLQLVGVTSMLIASKYEEMYAPEVADFVYITDNAYTKKEILEMEQHILKKLNFSFGRPLCLHFLRRDSKAGQVDANKHTLAKYLMELTITEYDMVQYLPSKIAAAALCLSMKLLDSTHWTETLTHYSSYCEKDLVSTMQKLASLVIKAENSKLTAVHTKYSSSKFMKISKLAALKSPLVKELAAASV

SEQ ID NO: 7479 - DNA, 1479 bp, Candida albicans
  CDS (1)..(1479): transl_table=12
atgccacaagtcactaaaactaataatgaaaatgagtttagacttactagatcaaaagtacagcatcaagagtcgataagtaccatcaaaaatacgaccatatccaattctcagcataaacaacaaacacaacaacaaatttcatcaccacctcaagtctctgtaacatcatctgaaggagtttcacatgtcaatacacgtcaatatttgggtgatgtttcaaatcaatacataacaaatgctaaaccaacaaataaaagaaaaccattgggtggagacaatgcccctctacaaaaacaacagcatagaccatctagaccaatacccattgccagtgataacaacaataatggtagtaccagtagcagtagcaacagtagcaacaacaataacaacgacgcaaatagactagcatctttggcagttccatctcgattaccccaaaaacgacaagctactgaatcgtcgacaaatttagtagagaaattaagagtaccacaaccagaagtaggggaaagaagtcagtcataccataagaaatcacgtttaattgattatgaatggcaggatttggatgaagaagataatgacgaccaattaatggttagtgaatatgttaacgaaatattttcgtactattacgaattagaaacacgaatgttacctgatccgcaatatcttttcaaacaaacattgttaaaaccaagaatgagatcgatattggttgattggcttgttgaaatgcatttaaaattcaagttattacctgaatcactttttttggcagtcaatgtaatggatagattcatgtctgttgaagtggttcaaatagataaattacaattattggctacagcagctttatttactgctgccaaaaatgaagaagtattttctcccctggttaaaaattatgcatatttcactgatggttcatatactccagaagaagtggtacaagcagaaaaatacatgcttaccattcttaactttgatttgaattaccccaatccaatgaatttcttgagaagaatttctaaagctgatgattatgatgtccaatcaagaacgctaggaaaatatcttttggaaatcactatagttgattacaaatttattggtatgagaccatctttatgttgtgccctggccatgtatttagcaagactaatattgggcaaattgccagtttggaatgggaatttgattcattatagtggaggttatagaatcagtgatatgagagaatgtatcgaattaatgtttcaatatcttattgctcctatagaacatgatgaatttttcaaaaaatatgccatgagaaaatttatgagagcaagtactctttgtcgaaattgggctaaaaaattccaagcatcaggaagagatttgtttgatgaacgattatcgacccataggctaacattagaagatgatgacgaagaagaagaaatagtggtagcagaagcagaagagtaa

SEQ ID NO: 7480 - protein, 492 aa, Candida albicans
MPQVTKTNNENEFRLTRSKVQHQESISTIKNTTISNSQHKQQTQQQISSPPQVSVTSSEGVSHVNTRQYLGDVSNQYITNAKPTNKRKPLGGDNAPLQKQQHRPSRPIPIASDNNNNGSTSSSSNSSNNNNNDANRLASLAVPSRLPQKRQATESSTNLVEKLRVPQPEVGERSQSYHKKSRLIDYEWQDLDEEDNDDQLMVSEYVNEIFSYYYELETRMLPDPQYLFKQTLLKPRMRSILVDWLVEMHLKFKLLPESLFLAVNVMDRFMSVEVVQIDKLQLLATAALFTAAKNEEVFSPSVKNYAYFTDGSYTPEEVVQAEKYMLTILNFDLNYPNPMNFLRRISKADDYDVQSRTLGKYLLEITIVDYKFIGMRPSLCCASAMYLARLILGKLPVWNGNLIHYSGGYRISDMRECIELMFQYLIAPIEHDEFFKKYAMRKFMRASTLCRNWAKKFQASGRDLFDERLSTHRLTLEDDDEEEEIVVAEAEE

SEQ ID NO: 7481 - DNA, 1437 bp, Emericella nidulans
  CDS (1)..(1437)
atgaatgaaaacgacgagaatggtccctcaacgcgtcttactcgcgccaaagccgccgccctgacaacagacgcccctgctgccaatggagccctcaagaaaccccttcagacaaagaaagccgccactggcgccaacggcacacaaagaaaacgtgctgcgcttggtgatgttagcaatgtcggaaaggcggacaatggcgagaccaaggacgcgaagaaggccacatccaagaccggccttacatcaaaagctaccatgcagtcggggggcgttcaaaagctcagccgcagcaatctatcccgtaccgccgtcggagcaaaggacaacaatgtaaagaaacctgccacagaggcaaagcgccctggaagtgggtctggtatgggaagcgcgatgaagcgcacatccagccaaaagtctctacaggaaaagaccatccaacaagaagagcctccccgcaagaaggtcgacattgaaaaggtcgtggaaaagcaggctgaggctgtctcggttaagggggatgttaaggcaggggcacaaacagaagagcttgaaaagcctcaagatttcgttgccgacctagacactgaggacctggacgaccccttgatggctgctgaatacgtggtggagatcttcgattaccttcgcgagctggagatggagacgttgccaaaccctgattacatcgatcaccagccagaccttgagtggaagatgcgcggcatcctggttgactggctcatcgaagttcacactcgcttccgtcttcttcctgaaacgcttttccttgccgtcaacattattgaccgtttcctctctgccgaagtggtcgccttggaccgtctccagttggttggtgttgctgccatgtttattgcttccaaatatgaagaagttctctccccccatgtcgccaatttcagccacgtcgccgacgaaaccttctctgataaggagatcctggatgccgaacgtcacattctggccacgcttgaatacaacatgagctatcccaatcctatgaacttcctgcgccgtatttccaaagcagacaactacgacattcaaacacgtactcttggaaagtacttgatggagattagcctgcttgatcacaggtttttgggctaccctcagagccaaatcggtgcagcagccatgtacttagctcgtctgattttagaccgtggtccttgggatgccactcttgcccattacgctggctacaccgaggaagagattgatgaagttttccggttgatggttgactacctccaccgtcccgtctgccacgaagcattttttaagaaatatgcaagcaagaagttccttaaggcctctatcatgacacggcagtgggccaaaaaataccaccatctgtacattgacagcgcgctcacagagccgtacaactccatcaaagacaacgaatag

SEQ ID NO: 7482 - protein, 478 aa, Emericella nidulans
MNENDENGPSTRLTRAKAAALTTDAPAANGALKKPLQTKKAATGANGTQRKRAALGDVSNVGKADNGETKDAKKATSKTGLTSKATMQSGGVQKLSRSNLSRTAVGAKDNNVKKPATEAKRPGSGSGMGSAMKRTSSQKSLQEKTIQQEEPPRKKVDIEKVVEKQAEAVSVKGDVKAGAQTEELEKPQDFVADLDTEDLDDPLMAAEYVVEIFDYLRELEMETLPNPDYIDHQPDLEWKMRGILVDWLIEVHTRFRLLPETLFLAVNIIDRFLSAEVVALDRLQLVGVAAMFIASKYEEVLSPHVANFSHVADETFSDKEILDAERHILATLEYNMSYPNPMNFLRRISKADNYDIQTRTLGKYLMEISLLDHRFLGYPQSQIGAAAMYLARLILDRGPWDATLAHYAGYTEEEIDEVFRLMVDYLHRPVCHEAFFKKYASKKFLKASIMTRQWAKKYHHLYIDSALTEPYNSIKDNE

SEQ ID NO: 7483 - DNA, 1248 bp, Schizosaccharomyces pombe
  CDS (1)..(1248)
atggacgtttcgactcaaacaagacacgcaacatattttcaagatgagaatcagctacaaaaggatcacatttatgtgaagaagaaaagtcacatcaagttaaatacgggtgttcgtgcacctttcaaggcagtagataacatcaatcaacaagatgaaccaacattgattgaagggaataatgaatcctccatctcttcgtccactggcgacacttttgaagaggattttgcataccaggacaaagtcgagatagaggaacggtcaattcgctccactcctaagtctattggagatgatgatttggaaaaccgtgagggcagctttgacgcacctgaaggaattcttacacacgggaagcatagactaccaacaattcccgagtggaccaaggaagatttagccgccctgtctgaagctgctgctcgattacaagctaacccatcgcctgaggatatagaaactgatccatccatggtaccagactatgatcctgagatatttcactacatgcaatctttggaaaggaagctggctccacctcctaattacatgtcagttcagcaagagattgactgggttacaagacatatgcttgttgattggattgtgcaagttcaaatacattttcgtttacttcctgagacattatttttggcggtaaaccttatcgaccggtttctttccataaaagtcgtatctttgcaaaaagtccagttggtaggtttatcagctttgctgattgcctgtaagtatgaagagatacaccctccaagcatctacaactttgcgcatgttgtccaagggatcttcaccgttgacgaaatcattagagccgagcgctatatgctgatgcttttggattttgacattagttggccagggcccatgtcgtttttgcgtcgtataagtcgagctgattcttacgatcacgacattcgcatgctcgccaaatatcttcaagaagtaaccttgatggatgaaatttttataggtgcccatattagcttcattgctgctactgcctactacttgtctatgcagatgttgggtcatttggattggactccttgccatgtatattatagtgggtacacggctcgtcaattgaaaccgtgtgccataatcattatggaatgtttggtcgatgcccctaaccatcacaatgccatttaccgaaagtactcggagaatagaatgaagcgagttagcgcctttgctcacaactgggtactaagtgtgatttga

SEQ ID NO: 7484 - protein, 415 aa, Schizosaccharomyces pombe
MDVSTQTRHATYFQDENQLQKDHIYVKKKSHIKLNTGVRAPFKAVDNINQQDEPTLIEGNNESSISSSTGDTFEEDFAYQDKVEIEERSIRSTPKSIGDDDLENREGSFDAPEGILTHGKHRLPTIPEWTKEDLAALSEAAARLQANPSPEDIETDPSMVPDYDPEIFHYMQSLERKLAPPPNYMSVQQEIDWVTRHMLVDWIVQVQIHFRLLPETLFLAVNLIDRFLSIKVVSLQKVQLVGLSALLIACKYEEIHPPSIYNFAHVVQGIFTVDEIIRAERYMLMLLDFDISWPGPMSFLRRISRADSYDHDIRMLAKYLQEVTLMDEIFIGAHISFIAATAYYLSMQMLGHLDWTPCHVYYSGYTARQLKPCAIIIMECLVDAPNHHNAIYRKYSENRMKRVSAFAHNWVLSVI

SEQ ID NO: 7485 - DNA, 1416 bp, Saccharomyces cerevisiae
  CDS (1)..(1416)
atgtcacgatcccttttggtagagaatagtagaaccattaatagtaatgaagagaagggggtaaacgaaagtcaatatatcttacaaaagagaaacgtcccaaggaccattctcggtaatgtcacaaataatgcaaatatcctgcaagagatttctatgaacagaaaaattgggatgaagaacttctcaaaattgaacaacttctttcctttaaaggatgatgtttcgagagccgatgacttcacctcctcttttaatgacagtagacagggggtgaaacaagaagtactaaacaataaggaaaatattcctgaatatggatattccgagcaagaaaagcagcagtgctcaaatgatgactcttttcatacgaattcgactgccttgagctgtaatcggttgatatactctgagaacaagtctatttccactcaaatggaatggcagaaaaaaataatgagagaagattccaaaaaaaaaaggccaatatcaactcttgtagagcaggatgaccagaaaaagttcaaactccatgaattgactacagaagaagaggttctggaggagtacgaatgggatgacctagatgaagaagattgtgatgatcccttaatggtgagcgaagaggttaatgatatcttcgattatttgcatcacttggaaataatcacattgccaaataaggcgaatctctataagcataaaaatattaagcaaaacagagacattttggtgaactggataatcaagattcataataagtttggccttctgccggaaactctatatttggccataaacataatggatagatttctttgtgaagaggtggttcagttaaatagattgcaactggttggtacatcatgcctgttcatcgcatctaagtatgaggaaatatactcccctagcataaaacattttgcgtacgagacagacggtgcatgctctgtggaagatattaaagagggtgaaagatttatattggaaaaactcgattttcaaattagtttcgctaacccaatgaatttcttaaggagaatatcaaaagcggatgactatgatatccagtctaggacgttagcgaagttcctaatggaaatatctatagtggacttcaagttcatcgggatattaccgtcattatgtgcctcagcggcaatgttcctttcgagaaaaatgctgggcaagggcacctgggatggcaacttaatccattatagtggtggttacacaaaggcaaaactatatcccgtttgccaattactgatggattatcttgttggatctactattcacgacgagttcttgaaaaaatatcaatcgagaagatttttaaaggcttccataatttctatcgaatgggcattgaaggtaaggaaaaatggatatgatattatgacattgcatgagtga

SEQ ID NO: 7486 - protein, 471 aa, Saccharomyces cerevisiae
MSRSLLVENSRTINSNEEKGVNESQYILQKRNVPRTILGNVTNNANILQEISMNRKIGMKNFSKLNNFFPLKDDVSRADDFTSSFNDSRQGVKQEVLNNKENIPEYGYSEQEKQQCSNDDSFHTNSTALSCNRLIYSENKSISTQMEWQKKIMREDSKKKRPISTLVEQDDQKKFKLHELTTEEEVLEEYEWDDLDEEDCDDPLMVSEEVNDIFDYLHHLEIITLPNKANLYKHKNIKQNRDILVNWIIKIHNKFGLLPETLYLAINIMDRFLCEEVVQLNRLQLVGTSCLFIASKYEEIYSPSIKHFAYETDGACSVEDIKEGERFILEKLDFQISFANPMNFLRRISKADDYDIQSRTLAKFLMEISIVDFKFIGILPSLCASAAMFLSRKMLGKGTWDGNLIHYSGGYTKAKLYPVCQLLMDYLVGSTIHDEFLKKYQSRRFLKASIISIEWALKVRKNGYDIMTLHE

SEQ ID NO: 7487 - DNA, 1236 bp, Schizosaccharomyces pombe
  CDS (1)..(1236)
atggctctctattcaatttcaaagcctgttggttctaaaatcaataagcatagttatcaagatgaaaacacacttgttggcaaacaagctttatcaaaagggactgagaagacaaaattatctacaaattttgaaattaatctgccacgtcgaactgtcctatctgatgtttccaatgtaggtaaaaataatgctgatgagaaggatacgaaaaaagcgaaaagatcgttcgatgaatctaatttatctacaaatgaagaagctgataaacctgtcgaatctaaattcgtgaaaaagttgaaagtttatagcaaaaatgcggatccatctgtagaaactttacaaaaggacagagtctctaatgttgatgatcatttatcctccaatcctttgatggctgaggaatacgcacccgaaatatttgagtacatcagaaagctggatttaaagtgtcttcccaatccaaaatatatggaccaacaaaaagaattaacctggaaaatgagggaaattttgaatgaatggttggtggaaatacattccaacttttgtttaatgcccgaaaccctttatttggcagtcaatataattgatcgattcttgtcgcgtcgttcatgctctttgtctaaatttcaattaacaggcattactgctcttctcatcgctagcaaatatgaggaggttatgtgtccttcgatacaaaactttgtttacatgactgatggtgcttttaccgtagaagatgtctgtgtcgctgaacgttatatgttaaatgttctcaattttgacttgtcctatccaagtcctttaaattttcttcgcaaaatatctcaagcagaaggttatgatgcacaaacaaggacattggggaaatacctaacagaaatttatctgtttgaccacgatttattacgatatcctatgtctaaaattgctgctgccgcaatgtatttgagccgccgattattgcgtcgcggcccatggacgccaaagttagttgaaagctctggtgggtatgaagagcatgaattaaaggagatagcgtatattatgcttcattatcataacaagcctctagaacacaaagcctttttccaaaaatactcctcaaaaaggttcctgaaggctagtatttttgttcatcaactcgtccgtcaacgatactcagtcaatcgtacggacgatgatgaccttcaatcagaaccgtcttcttctttaacaaatgatggtcactaa

SEQ ID NO: 7488 - protein, 411 aa, Schizosaccharomyces pombe
MALYSISKPVGSKINKHSYQDENTLVGKQALSKGTEKTKLSTNFEINLPRRTVLSDVSNVGKNNADEKDTKKAKRSFDESNLSTNEEADKPVESKFVKKLKVYSKNADPSVETLQKDRVSNVDDHLSSNPLMAEEYAPEIFEYIRKLDLKCLPNPKYMDQQKELTWKMREILNEWLVEIHSNFCLMPETLYLAVNIIDRFLSRRSCSLSKFQLTGITALLIASKYEEVMCPSIQNFVYMTDGAFTVEDVCVAERYMLNVLNFDLSYPSPLNFLRKISQAEGYDAQTRTLGKYLTEIYLFDHDLLRYPMSKIAAAAMYLSRRLLRRGPWTPKLVESSGGYEEHELKEIAYIMLHYHNKPLEHKAFFQKYSSKRFLKASIFVHQLVRQRYSVNRTDDDDLQSEPSSSLTNDGH

SEQ ID NO: 7489 - DNA, 1476 bp, Saccharomyces cerevisiae
  CDS (1)..(1476)
atgtccaacccaatagaaaacacagaaaactcacagaatactagttcatcaaggtttttgaggaatgtacaaaggttggccttaaacaatgtaacaaatacgacatttcaaaagagtaatgcgaataatccagccctaacaaatttcaaatctacactaaactcagtaaagaaggagggaagtcggattcctcaatttactagagaaagcgtatcaagatcaacagccgcacaagaggagaaaagaaccctgaaagaaaatggtatccaactccccaaaaacaatcttttagatgataaagaaaaccaagacccaagtagtcagcaatttggtgcgctaacttctataaaggaggggagagctgagctgcctgcaaatataagtttacaagaatcctcctcagcgaaggagataatccagcatgatcccctaaaaggcgttggatcaagcactgaggtagtccataactcggtagaaaacgaaaaacttcatccagctagaagtcaacttcaagttagaaataccgaaagtgaaactgatagtggaaaaaaaagaccaatttctacaattgttgaacaagaactgcccaaaaagtttaaagtgtgcgatgaaaatggcaaagaagaatatgaatgggaagacctagatgcagaagatgtaaatgatccattcatggtcagcgagtacgtcaatgatatattcgaatatctccaccaactagaggtcattactcttccaaagaaggaagatctctatcagcatagaaatattcatcaaaatcgagatatcctagttaattggttggttaaaatccataataaattcggcttattaccggagactttgtatcttgccattaacataatggacaggtttttaggtaaagagctagttcaactggataagttacaattggttggcacatcatgccttttcattgcctctaaatatgaagaggtctattctcctagtataaaacatttcgcatcagagacagacggtgcatgtacggaagatgaaatcaaagaaggggagaaattcattttaaagacattgaaatttaacctaaattatcccaatccgatgaattttctgagaagaatttcgaaagcagatgactacgatatacagtctcgaactcttgccaaattcttattagagatatcattggtagatttcagatttattgggatactaccctcattgtgtgcagcagctgcgatgtttatgtcgagaaaaatgttaggtaaaggtaaatgggatggaaatctaatacactatagcggcgggtatactaaagaagaacttgcgcccgtgtgtcacatgataatggattatctagtgagtccaattgttcatgatgaatttcatagaaaatatcaatctagaagatttatgaaagcttctataatttccgtccaatgggctttaaaggttagaaaaaacggctatgatataatgaccttgcatgaatga

SEQ ID NO: 7490 - protein, 491 aa, Saccharomyces cerevisiae
MSNPIENTENSQNTSSSRFLRNVQRLALNNVTNTTFQKSNANNPALTNFKSTLNSVKKEGSRIPQFTRESVSRSTAAQEEKRTLKENGIQLPKNNLLDDKENQDPSSQQFGALTSIKEGRAELPANISLQESSSAKEIIQHDPLKGVGSSTEVVHNSVENEKLHPARSQLQVRNTESETDSGKKRPISTIVEQELPKKFKVCDENGKEEYEWEDLDAEDVNDPFMVSEYVNDIFEYLHQLEVITLPKKEDLYQHRNIHQNRDILVNWLVKIHNKFGLLPETLYLAINIMDRFLGKELVQLDKLQLVGTSCLFIASKYEEVYSPSIKHFASETDGACTEDEIKEGEKFILKTLKFNLNYPNPMNFLRRISKADDYDIQSRTLAKFLLEISLVDFRFIGILPSLCAAAAMFMSRKMLGKGKWDGNLIHYSGGYTKEELAPVCHMIMDYLVSPIVHDEFHRKYQSRRFMKASIISVQWALKVRKNGYDIMTLHE

SEQ ID NO: 7491 - DNA, 1449 bp, Schizosaccharomyces pombe
  CDS (1)..(1449)
atgactacccgtcgtttaactcgccagcacctattggcaaataccttgggcaacaatgacgaaaatcatccttcaaaccatattgcccgtgcaaaaagctctttgcactcttcagaaaattctttagtaaatggcaagaaagccactgtgtcttccaccaacgttcctaagaagcgtcatgcgttggatgatgtttccaattttcacaacaaagaaggtgttccattagctagtaaaaacacaaatgtcagacacactactgcttctgtcagtacccgtcgtgctctcgaggaaaagtctataatccctgcaacagatgatgaacccgcttccaagaagcgtcgccaaccttctgtttttaattcatcagtcccctcgttacctcaacacttgtcaacgaaatcacactctgtttcaacccatggggttgatgctttccataaggatcaagcaactattccaaaaaaattaaagaaagatgttgatgaacgcgttgtttcgaaagatattcccaaacttcaccgtgatagtgttgagagtcccgaatctcaagattgggatgacttggatgcagaagattgggctgaccctcttatggtttctgaatatgtcgttgatatttttgaatatttgaatgagttggaaattgaaactatgccctctcctacttatatggatcgtcaaaaagagcttgcatggaagatgcgtggaatacttaccgattggttaattgaagtgcattctcgtttccgactgcttcctgaaacattgtttttggccgtaaatattattgatagatttttatcattgcgggtatgctctcttaacaaactacaattggttggcattgctgccttgttcatcgctagcaagtatgaggaggtgatgtgcccttcagtccaaaactttgtatatatggcggatggtgggtatgatgaagaggaaattcttcaagccgagcgctacattttgcgtgtcctagagtttaatcttgcttacccgaatcctatgaatttcctacgtcgtatctcaaaagccgacttttacgatattcaaacaagaactgttgcaaagtatcttgttgaaattggtcttttagatcataaacttttaccttatcccccttcccaacagtgtgctgccgctatgtaccttgccagggaaatgcttggacgtggaccgtggaatcgtaatcttgtgcattactcaggttatgaggagtaccaattaatttccgttgttaagaagatgattaattatttacaaaagcctgttcaacatgaagcttttttcaagaagtatgcctccaaaaagtttatgaaagctagtctttttgttcgtgactggatcaagaagaattctatccctcttggcgatgacgctgatgaagattatacttttcacaagcaaaaacgtatacaacatgacatgaaagatgaagaatggtaa

SEQ ID NO: 7492 - protein, 482 aa, Schizosaccharomyces pombe
MTTRRLTRQHLLANTLGNNDENHPSNHIARAKSSLHSSENSLVNGKKATVSSTNVPKKRHALDDVSNFHNKEGVPLASKNTNVRHTTASVSTRRALEEKSIIPATDDEPASKKRRQPSVFNSSVPSLPQHLSTKSHSVSTHGVDAFHKDQATIPKKLKKDVDERVVSKDIPKLHRDSVESPESQDWDDLDAEDWADPLMVSEYVVDIFEYLNELEIETMPSPTYMDRQKELAWKMRGILTDWLIEVHSRFRLLPETLFLAVNIIDRFLSLRVCSLNKLQLVGIAALFIASKYEEVMCPSVQNFVYMADGGYDEEEILQAERYILRVLEFNLAYPNPMNFLRRISKADFYDIQTRTVAKYLVEIGLLDHKLLPYPPSQQCAAAMYLAREMLGRGPWNRNLVHYSGYEEYQLISVVKKMINYLQKPVQHEAFFKKYASKKFMKASLFVRDWIKKNSIPLGDDADEDYTFHKQKRIQHDMKDEEW

SEQ ID NO: 7493 - DNA, 1284 bp, Saccharomyces cerevisiae
  CDS (1)..(1284)
atgcatcataactcacagtctttgagctctggacacatcaggagccccgaggatgaaaatgtggcacctataggtaatcttaaacacaggactggatccctcagtcatatatcatctgcgcacccgagggtcgcacttagcgacgttaccaatatagttgcgacaaactctagcaacaacagcataagtaagccaaaagtcgccccaattaaagaaagattggattcagctgcgataattgaggaagaaaggctggatgcgaatagtgttgcacagagaaaagaagctgatcataacgatttgttaacggacagggaacaagaggaacccgttgaagacgacggagaaagcgaagaggatgaagaagaagaccaggagcctctactgttgcaacattatgctagtgatacattggtctgggagcatgcatttagaacttactatagaactacattagatcccaatgatgatgacgtgtacgatgtggtcatggttgccgaattatctaatgagatattcgagtatatgaggaaattggaagacctgtataaacccaacccgtactacatggataaacaaccagagttaagatggtcgtttcgaagcacactgattgattggatcgtccaagtacatgaaaaatttcaacttttacctgaaactctatatctctgcattaatataatagacagatatctgtgcaaagaagttgttcctgtaaataagttccaacttgtgggtgcagcctcactcttcattgctgctaaatatgaggaaatcaactgtcctacaatcaaggatttcgtatacatgtcagaaaactgctactcaaggaacgacctgctggacgcagaaagaactattttgaacggcttagaatttgaattgggttggcctggtccgatgtcatttttacgaagaatcagtaaggcagacgattacgagcatgatacgagaacactggccaaatatctattggaatccacaataatggaccatcgactggtttccgctcaacctagttggttagctgccggtgcatactttctaagtaagattattctgggccaaaatcagtggtctctggcgcacgtctactattccaattatacacaagaacaaattcttccgttggccaccattattttagaaaattgcagatatgcctctaaacgtcataacgccatatggagaaaatattcttcacgtcgttatttgcattcttcacagatcgtagcgaagtggatagcattagctgaacacagagtagaaagatctaactaa

SEQ ID NO: 7494 - protein, 427 aa, Saccharomyces cerevisiae
MHHNSQSLSSGHIRSPEDENVAPIGNLKHRTGSLSHISSAHPRVALSDVTNIVATNSSNNSISKPKVAPIKERLDSAAIIEEERLDANSVAQRKEADHNDLLTDREQEEPVEDDGESEEDEEEDQEPLLLQHYASDTLVWEHAFRTYYRTTLDPNDDDVYDVVMVAELSNEIFEYMRKLEDLYKPNPYYMDKQPELRWSFRSTLIDWIVQVHEKFQLLPETLYLCINIIDRYLCKEVVPVNKFQLVGAASLFIAAKYEEINCPTIKDFVYMSENCYSRNDLLDAERTILNGLEFELGWPGPMSFLRRISKADDYEHDTRTLAKYLLESTIMDHRLVSAQPSWLAAGAYFLSKIILGQNQWSLAHVYYSNYTQEQILPLATIILENCRYASKRHNAIWRKYSSRRYLHSSQIVAKWIALAEHRVERSN

SEQ ID NO: 7495 - DNA, 1308 bp, Saccharomyces cerevisiae
  CDS (1)..(1308)
atgggagagaaccacgaccatgagcagagtattaaaagaaattctatgatttataatgaaaatgagaggcagttgtgcaattcaaacctaaagattcttcaaaataaaagggccctttcaaaaaatgacagctctagtaagcagcaggttcaggattctaaaccaagaagggctttaacagatgtaccagtgaacaataatcctttaagccagaacaagagaatagtagcagggagcaaggcggccaaagtacgaagagaagaaaacattagacctattgttagcgccgttcaaaaaagacagatatataacgatcgaacggcagcagagcaagaagaagaagaagaagaagaaggagaagatgatgatgctgcttcgatagtgaacaaaaaacgcagaatagacgctgaaggagtgagtgaaatagtaggctggcaggacctagattatgttgaaaaagatgatactgcaatggtagcagaatattctgctgaaatttttgcatttttatatagaagagaattagaaacgttaccatcgcacaactatttactcgacaaaacgtccaagtattatttgaggccttccatgagaacaatattagtggattggctggtagaggtgcacgaaaaatttcaatgctatccggaaacgttattcctatccataaacttaatggatagatttttagctaaaaataaagttacgatgaacaagttacaattattggcagttacctcacttttcatcgcggcaaaatttgaagaggtaaatttgcccaaactagctgaatacgcttatatcactgacggcgcggcttctaaaaacgacataaaaaatgcggaaatgttcatgctcacttccttagaattcaacattggttggcccaacccactcaatttcctaaggaggatctccaaggcagatgattacgatccggttaatagaaatattggtaagtttattttagagtatgcctactgctgccaccaattcattcatttacctccatctaccgtaagcgcaatggcaatgtatatagcgagaagaatgaccaacagaaacaagaacgagctatggaatggaacactacagcattacagtggtggtatcgatccaatacacgatgaagcgtttcagtctctctgcattgatctagtcaaagacatcgctagttccaaaactcatttagattcattgattttgaagtacaagaaaccaaggtatggctctgtttatttccaaactttcaagtggtgtacatccgaaatgcatagcaactttcaaaatctatttaatcttaagtag

SEQ ID NO: 7496 - protein, 435 aa, Saccharomyces cerevisiae
MGENHDHEQSIKRNSMIYNENERQLCNSNLKILQNKRALSKNDSSSKQQVQDSKPRRALTDVPVNNNPLSQNKRIVAGSKAAKVRREENIRPIVSAVQKRQIYNDRTAAEQEEEEEEEGEDDDAASIVNKKRRIDAEGVSEIVGWQDLDYVEKDDTAMVAEYSAEIFAFLYRRELETLPSHNYLLDKTSKYYLRPSMRTILVDWLVEVHEKFQCYPETLFLSINLMDRFLAKNKVTMNKLQLLAVTSLFIAAKFEEVNLPKLAEYAYITDGAASKNDIKNAEMFMLTSLEFNIGWPNPLNFLRRISKADDYDPVNRNIGKFILEYAYCCHQFIHLPPSTVSAMAMYIARRMTNRNKNELWNGTLQHYSGGIDPIHDEAFQSLCIDLVKDIASSKTHLDSLILKYKKPRYGSVYFQTFKWCTSEMHSNFQNLFNLK

SEQ ID NO: 7497 - DNA, 1143 bp, Saccharomyces cerevisiae
  CDS (1)..(1143)
atgaattgtatccctagtccaattagtgaaaggaaaatccaaattaataatgaagattgtataggcaaggaaaatgctttccataccattccaagagaaagttcaattaacttgacacctcactctacgaatgaaaaaaaagttctatccgaggtaaacagtaacaaaatcgattctttacaactccctcgaggtaaattgcaaagagattccacccatttggaaaaaacaagaaagagacaattatcaaatgattcaaccgatcctatagagccaaaaactgtgaaaaaaataaaatgtcatcaatggaaaaatttggattcgatagagatggatgatccattcatggtagcagaatatacagattctatattttctcatctttacgagaaggaaatccaaatgctaccgacacataactatttaatggacacgcaatctccctatcatttgaaaagctccatgagggcgctgttaattgactggttggttgaagttcatgagaaatttcactgcttacctgaaacattatttttagcgatcaacctgctagatcgatttttatcacaaaatgttgttaaattgaataaattacaactactatgcatcacttgcctgttcattgcctgtaaatttgaagaagttaaattaccaaaaataacaaattttgcgtacgtgactgacggtgctgccactgtcgaaggaattaggaaggctgagctattcgttctaagttctttaggttataacatatctctaccaaaccccctaaatttcattaggagaatttcaaaagctgacaattactgcattgaaacaaggaacatggccaaattcatcatggaatattcgatttgttgtaataaattcatccacctgaagccatcatatttagctgcaatgtccatgtatatcgccagaaaaattaaaaatgaaaattccaaatgggatgaaacttttattcattatagtggcggcattgatattgaatcagatccagcgtttaaggattttatcagtgaactagttgaagatattgctgtacctgatacgaatctagattccttgagacttaaatacaaaaagcctaaacatggcatggtttatttcaaggtttttgactggtgtaaacaaaaacgttga

SEQ ID NO: 7498 - protein, 380 aa, Saccharomyces cerevisiae
MNCIPSPISERKIQINNEDCIGKENAFHTIPRESSINLTPHSTNEKKVLSEVNSNKIDSLQLPRGKLQRDSTHLEKTRKRQLSNDSTDPIEPKTVKKIKCHQWKNLDSIEMDDPFMVAEYTDSIFSHLYEKEIQMLPTHNYLMDTQSPYHLKSSMRALLIDWLVEVHEKFHCLPETLFLAINLLDRFLSQNVVKLNKLQLLCITCLFIACKFEEVKLPKITNFAYVTDGAATVEGIRKAELFVLSSLGYNISLPNPLNFIRRISKADNYCIETRNMAKFIMEYSICCNKFIHLKPSYLAAMSMYIARKIKNENSKWDETFIHYSGGIDIESDPAFKDFISELVEDIAVPDTNLDSLRLKYKKPKHGMVYFKVFDWCKQKR

SEQ ID NO: 7499 - DNA, 1341 bp, Zea mays
  CDS (1)..(1341)
atggcgacgaggaaccaccgcgccgctgccgctccgcagccggcgaacagaggtgccgcgagggtcgccgggaaacagaatgccgccgccgccgccgccgggacacgccgagccctcggtgacattggcaacgtcgtctccgatgccctcgacagggcgatcaagctgccggaggggatccatcgccccatcaccaggagcttcggcgcccagctcatgaaggccgctttggcgaacaagaacgccgacgccgccgtagctcctgctcagcctgtagcggcgcgcgccgttacgaaaccagctaggaaagtgactacgaagaacgtccctcgtcctggcgctgggcaggctcccaaggagaacaagaagccatcagcagagggtgccgccgccggcagcggccgctctgttcagaagaacaggaggaagaagcccgcgtgcacgctttcgaccgtcctttctgcgcgttctaaggctgcctgtggccttaccgagaagccaaaggagcccatcgaggacattgacaagttcgatggcgacaaccagcttgctttggtggactacgttgaggacatctacacattctacaagaccgcccagcatgagagccgccccattgactacatgggcaaccagcccgagctcagccccagaatgcgctccatcctcgcggactggctcatcgagtctcaccgaagattccagctcatgccggaaacgctctacctcacaatatacatcgtggaccggtacctgtcgctgcagcccacgccgaggagggagctccagctcgtcggcgtggcagcgttgctgatcgcctgcaaatacgaggagatctgggcaccggaggtaaatgacttaatccatatagccgatggcgcgtttaaccggagccagattcttgccgccgagaaggctattctgaacagcatggagtggaaccttacggtccccaccccgtaccacttcctgctgcggttcgcgaaggctgccggtagtgccgatgaacagcttcagcatacgataaacttctttggagagctcgcgctgatggactacggtatggtgatgaccaatccttcgacggcggctgcttgcgctgtgtacgctgctcgcctcacgttggggaggagtcctctctggacagagaccttgaagcaccacactggcctcaacgagcagcagatcatggaaggcgccaagacactggtcggatctcatgctgctagtgctagccctgatgcgaggctgaaggccgtctaccagaagtacgcgacggagcagtttgggcgtgtggctctgcacccaccggcaccggctgctcttcccgaccttgtctag

SEQ ID NO: 7500 - protein, 446 aa, Zea mays
MATRNHRAAAAPQPANRGAARVAGKQNAAAAAAGTRRALGDIGNVVSDALDRAIKLPEGIHRPITRSFGAQLMKAALANKNADAAVAPAQPVAARAVTKPARKVTTKNVPRPGAGQAPKENKKPSAEGAAAGSGRSVQKNRRKKPACTLSTVLSARSKAACGLTEKPKEPIEDIDKFDGDNQLALVDYVEDIYTFYKTAQHESRPIDYMGNQPELSPRMRSILADWLIESHRRFQLMPETLYLTIYIVDRYLSLQPTPRRELQLVGVAALLIACKYEEIWAPEVNDLIHIADGAFNRSQILAAEKAILNSMEWNLTVPTPYHFLLRFAKAAGSADEQLQHTINFFGELALMDYGMVMTNPSTAAACAVYAARLTLGRSPLWTETLKHHTGLNEQQIMEGAKTLVGSHAASASPDARLKAVYQKYATEQFGRVALHPPAPAALPDLV

SEQ ID NO: 7501 - DNA, 1350 bp, Zea mays
  CDS (1)..(1350)
atgcccacgcgcaaccacaacgctgccgcggctgccgctccgcagcatcaccatcacaaccgaggtggtgctcccgctcttggaaagagcaaggccgtgcccggccgagctgatgccatgaaccggcgagcccccctcggcgatattggcaacctcgtcagcgtccgcccagccgaagggaaacctcagctgcaggagcagatcaatcgccccatcacgcgaagcttcggcgctcagctcgtgaagaacgtgcaggcgaatgccgcaatcaagaatgccgcaatcctacccgcgaggcatgcgccgaggcaggaaaggaaggctcctgccaagcagccgcctcctgaggatgtcatagtactcagctccgactctgaacagagcaggacgcagtccgagagcagcgctagctccgtccgctcgaggaagaaggtcatcaacaccctttcttctgtgctctcggctcgctcaaaggctgccggcggaatcgctggtaagcctagacaagtagcagtggtcgatgacatcgacaagttggacgtcaacaatgagctcgcagttgtggaatacattgaggacatctacacgttctacaagattgctcagcatgacagacggccatgtgattatatagacacccaagtcgagatcaaccctaagatgagggctatcctggctggttggataattgaagtacaccacaagttcgagctgatgccggaaactctctacttgaccatgtacatcatcgatcagtacctctcgctgcaaccagtcctgcgaagggagctgcagctggtcggtgtttcagctatgctgatcgcctgcaagtacgaggagatttgggccccagaggtgaacgatttcattcttatatcagacagtgcatacagcagggagcagatcctttcgatggagaagggaatcctgaatagcctggagtggaacctcactgtccctacagtgtatatgttccttgtccgttttctgaaggccgcaacattgggcggcaaagttgagaaagagatggagaatatggtgttcttcttcgctgaattggcgctgatgcaatacgatttggtgacgcgcctgccatcgctggtcgctgcttctgctgtctacgcagccagactcactctcaagagggctcccctttggaccgacaccctcaagcaccacacgggcttcagggagtcagaggcagagctcattgaatgcacgaagatgctggtgatcgcgcactcgactgcccctgagagcaagctgagggttgtatacaagaagtattccagcgagcagttcggaggggtcgcgctgcgtccacccgcagccgcagtggagatcaagtaa

SEQ ID NO: 7502 - protein, 449 aa, Zea mays
MPTRNHNAAAAAAPQHHHHNRGGAPALGKSKAVPGRADAMNRRAPLGDIGNLVSVRPAEGKPQLQEQINRPITRSFGAQLVKNVQANAAIKNAAILPARHAPRQERKAPAKQPPPEDVIVLSSDSEQSRTQSESSASSVRSRKKVINTLSSVLSARSKAAGGIAGKPRQVAVVDDIDKLDVNNELAVVEYIEDIYTFYKIAQHDRRPCDYIDTQVEINPKMRAILAGWIIEVHHKFELMPETLYLTMYIIDQYLSLQPVLRRELQLVGVSAMLIACKYEEIWAPEVNDFILISDSAYSREQILSMEKGILNSLEWNLTVPTVYMFLVRFLKAATLGGKVEKEMENMVFFFAELALMQYDLVTRLPSLVAASAVYAARLTLKRAPLWTDTLKHHTGFRESEAELIECTKMLVIAHSTAPESKLRVVYKKYSSEQFGGVALRPPAAAVEIK

SEQ ID NO: 7503 - DNA, 1248 bp, Glycine max
  CDS (1)..(1248)
atggagggctcaaaggaaaaccgtgtgcctccgcttccgctcataccctcttcgaatcttcaacaaggcggtggtccaagaatgaagcgcctactccatcaccatcaccggctgcctctcggcaacatcagtcagaatgttatgcctcattctcatgtcaacaaactagatcttgcccgcaagtttacgccacacacagttcagcaccacttccctcagccacatccacagcctcaagaaaataagaaacagaaccttttggccccgaccccgagttaccagttagattgtgatatcgtagatattgatgacgacgatggggatggcagtgatgatgccgttccggtatttgtcaagcacactgaagccatgcttgacgaaattgacaagatagaggaagttgaaatggaagatgtagaggaggaacctgttttggacatcgatgcctgtgataggaaagatacactggcagtggttgagtacatagatgatatatacagtttctacaaggacattgagaattcgagctgtgtctctccaaattacatgactagtcaacttgacattaatgagaggatgagggcaattcttattgactggcttattgaggttcactacaaatttgagcttttggaggagacgttgttccttactgtcaatctcatagacaggttcttggagcgtcaggcagtgatcagaaagaaacttcagttagttggtgtaacagccatgctaatagcttgtaagtatgaggaggtctcagttcctaccgttgaggattttattctcataacagacaaggcatatacaagaaatgaagttttagatatggagaaattaatgatgaacatcttgcaattcaagttgtctgtgcctactccatacatgttcatgagaagatttcttaaggcagctcattctgataaaaagctggagctcttgtccttcttcttggtcgagctttgcttggtagaatgcaaaatgctgaagttttcaccatctttgctggctgctgcagccatttacacagctcaatgtagtctgtaccagtttaagcaatggactaagactaccgagtggtacactgattactcagaagagaaacttcttgaatgctcaaggctgatggttactttccatcagaaagctggatcggggaaactcacaggtgtatatagaaagtacaatacatggaagtatggctgtgccgcgaaaatagaaccagccctgtttctactggataattaa

SEQ ID NO: 7504 - protein, 415 aa, Glycine max
MEGSKENRVPPLPLIPSSNLQQGGGPRMKRLLHHHHRLPLGNISQNVMPHSHVNKLDLARKFTPHTVQHHFPQPHPQPQENKKQNLLAPTPSYQLDCDIVDIDDDDGDGSDDAVPVFVKHTEAMLDEIDKIEEVEMEDVEEEPVLDIDACDRKDTLAVVEYIDDIYSFYKDIENSSCVSPNYMTSQLDINERMRAILIDWLIEVHYKFELLEETLFLTVNLIDRFLERQAVIRKKLQLVGVTAMLIACKYEEVSVPTVEDFILITDKAYTRNEVLDMEKLMMNILQFKLSVPTPYMFMRRFLKAAHSDKKLELLSFFLVELCLVECKMLKFSPSLLAAAAIYTAQCSLYQFKQWTKTTEWYTDYSEEKLLECSRLMVTFHQKAGSGKLTGVYRKYNTWKYGCAAKIEPALFLLDN

SEQ ID NO: 7505 - DNA, 1413 bp, Glycine max
  CDS (1)..(1413)
atggataaagtaaatagagtttgtgccaaagatgaagagcgtccactccgaatcaccagagcaagagctagagccttgagagggattactccatactcaagaccctccttaaaaaatgagcagaaaaatgtgcttcgagcacatccgaaaagagcagcatcttctgaaaacaaaacttctgtggttgttcctgctgttgtccaacagaagggaagggcagtgctttcagatgtatcaaacatgtgtgcaaaaccacatgataagtgtactaagtcatcaaagtttcaggccaaaggagtttatacaaagaaaaccaccaagctagcagcctcaagtgtttccactgacgtttcatcaacacaagacaatgttagagcaaagttagctgaagaattatccacaataaagatggtagaatcaaaggacaccttaagagaaggtgtaacagcagacacctcactttcaatgcaaaactctgtgaaatctgatgaactccggaactctccaaacaaagacatagatataatttgtgagaagctgggagcctcagactccctgaccattgtggacattgattcagtggagttaaaggatcctcaactgtggagttcatatgcccctgacatatacaacaatatacgagtcacagagcttcaaaggaaaccattaaccaactacatggacaagttacagaaagatatcaatccaagcatgcgaggaattctgattgattggcttgtggaggtttctgaggaatacaagctagttccagacactctttacctgaccgtgaacctcattgatcggtatctctcaaaaagactcattcagaagcaaaggctccagttgctcggtgttacttgcatgctgattgcatcaaaatatgaagagatttgtgcacctcgagtggaggaattttgcttcatcacagataatacatacacaaaagaagaggtattgaaaatggagagagaagtactggatcttgtgcattttcagttatctgttcccacaatcaaaacttttctaaggagattcatccaagcagcacaatcttcttacaaggctccttgcgttgaactggaattcctggcaaattatttagcagagcttgctcttgttgaatgcaactttttccagtttctaccttcccttgtagctgcatccgctgtgttccttgccaaatggaccctgaatgagtcagaacatccatggaatccaactctgaagcactatacaaaatacaaagcttcagagctcaagactgttgttcttgcactgcaagatctgcaacttaataccaaaggaagctccctgaatgctgtccctgagaagtataagcaacagaagttcaattgtgtggcaaacttgtctccaaaaccggtgcagtcactcttccaggacaaagtgtaa

SEQ ID NO: 7506 - protein, 470 aa, Glycine max
MDKVNRVCAKDEERPLRITRARARALRGITPYSRPSLKNEQKNVLRAHPKRAASSENKTSVVVPAVVQQKGRAVLSDVSNMCAKPHDKCTKSSKFQAKGVYTKKTTKLAASSVSTDVSSTQDNVRAKLAEELSTIKMVESKDTLREGVTADTSLSMQNSVKSDELRNSPNKDIDIICEKLGASDSLTIVDIDSVELKDPQLWSSYAPDIYNNIRVTELQRKPLTNYMDKLQKDINPSMRGILIDWLVEVSEEYKLVPDTLYLTVNLIDRYLSKRLIQKQRLQLLGVTCMLIASKYEEICAPRVEEFCFITDNTYTKEEVLKMEREVLDLVHFQLSVPTIKTFLRRFIQAAQSSYKAPCVELEFLANYLAELALVECNFFQFLPSLVAASAVFLAKWTLNESEHPWNPTLKHYTKYKASELKTVVLALQDLQLNTKGSSLNAVPEKYKQQKFNCVANLSPKPVQSLFQDKV

SEQ ID NO: 7507 - DNA, 1374 bp, Glycine max
  CDS (1)..(1374)
atgatctattggggtgagcctgtgtgtcaggagaatggatggattgtaacgtactggtccttgctcaccacaaagaggaaatcgattcagaacagttctaaaccaatcaaccctacaagttttcaaggagggatagaatgtgtggggaacagaaagatggggcagaacagaagggctttaagcgtgatcaatcaggatctggtggcggaagggagaccttacccttgtgttgttaacaagagggcattggcagaaaaacacaatgtttgtgagaagaagcaggcggatccggggcatcgacccatcacaaggaggtttgctgcacaaattgctagcacacagaaaaatcgtgcagagggaaccaagaagtcaaacttggggaattcaaattcgaatggatttggagagcacatatttgtcgatgaagaacacaagtcaacaacggatgaccagccagtgccaatgtctttagagaagacagagccaatgcatagtgaatcagatcagatggaggaagttgagatggaggatataatcgaagaagagactgttttggacattgatacctgtgatgcaaacaaccctcttgcagtcgtagactatattgaagatctttatgcccactacagaaaaatggagggtactagctgtgtctcgccggattatatggcacaacaatctgacattaatgaaaggatgagggctatactgattgactggcttattgaggtgcacgacaaatttgacctcttgcacgagacattgtttctcacagtcaatcttatagatcgatttttggcaaagcagacagtggcaagaaagaagcttcagttggttggtctagttgccatgcttttggcatgcaagtatgaagaagtttctgtacctgtggtgggggatctaattctcatatcagacaaagcatacacaaggaaggaagttctggaaatggagaagttgatggtgaacacattgcagttcaacatgtctgtgccaacagcatacgtttttatgaaaaggttcctaaaggcagctcaagcagacagaaagcttgagttattggctttcttcctggtagagctatctcttgtggaatatgagatgctgaagttccctccatctttgctagcagcagctgctgtctacacagcccaatgcacaatttatggtttcaaacaatggagcaaaacatgtgaatggcactcaaattactcagaagatcagctattagagtgctcaacattaatggccgcttttcatcagaaggctggaaatggaaaactaactggggtacataggaagtactgctcatctaaatttagctatactgcaaaatgtgaaccagcacgttttcttctggagaacccattgtag

SEQ ID NO: 7508 - protein, 457 aa, Glycine max
MIYWGEPVCQENGWIVTYWSLLTTKRKSIQNSSKPINPTSFQGGIECVGNRKMGQNRRALSVINQDLVAEGRPYPCVVNKRALAEKHNVCEKKQADPGHRPITRRFAAQIASTQKNRAEGTKKSNLGNSNSNGFGEHIFVDEEHKSTTDDQPVPMSLEKTEPMHSESDQMEEVEMEDIIEEETVLDIDTCDANNPLAVVDYIEDLYAHYRKMEGTSCVSPDYMAQQSDINERMRAILIDWLIEVHDKFDLLHETLFLTVNLIDRFLAKQTVARKKLQLVGLVAMLLACKYEEVSVPVVGDLILISDKAYTRKEVLEMEKLMVNTLQFNMSVPTAYVFMKRFLKAAQADRKLELLAFFLVELSLVEYEMLKFPPSLLAAAAVYTAQCTIYGFKQWSKTCEWHSNYSEDQLLECSTLMAAFHQKAGNGKLTGVHRKYCSSKFSYTAKCEPARFLLENPL

SEQ ID NO: 7509 - DNA, 1095 bp, Glycine max
  CDS (1)..(1095)
atggcaacttcggagaacaacaacgcgcgtccccaacgcgtggccaagaagagagcagcagctgcaatatgcgaacttcaccgcaacgccgccaagaggaaacgcgtcgttttgggtgacctcactaacgtttcatcaaactacgtcgccgttacggaaaaagaaattcagaaacagaaaaaggttaaacgcgagcaaccggcgcggccggtttccacgccggagaaggtagaggaaagacacgacccgcaactctgtaggccctacgtttcggatatatacgaataccttcgcggaatggaggtggatcctagtaagagaccattgacggattatgttcagaaaattcagagggatgtgaatgctaacatgcgcggtgttcttgtggattggttggtggaagttgcagaagaatacaaacttgtttcggacacgctttatttctctgttgcttatattgataggtttttgtcgttgaatattttgtcgagacagaggttgcaattgctgggggttgcttcaatgctcattgcttcaaaatacaaaaagattaacccgcccgaggtggaggatttttgttacattacggataacacatactctaaggaaaaggttgtgaacatggaggctgaaatattgaaggctttgaaatttgaattgggtggtccgacagtgaaaacattcttgaggagattctccaaagttgctcaagagggggttgatacttctgatctccagtttgagttccttagctgctaccttgccgagctcagtttgttggattataattgtataaagtttttgccatctttggtggctgcatcagttgtattcctagcaagatttatgtttagcacaaagacacatccttggaattcggcactccatcaactcactagatataaacctgctgacttgaaggaatgtgttctaaacttacatgacttgtacctcagtaggagaggggcctctttgcaagctgtgagagagaaatacaaacagcataagttcaaatgtgtggcaacaacaccatctcctcccgagatacctctttctttttttgaatttgaggggcagattcttaggcaattgtaa

SEQ ID NO: 7510 - protein, 364 aa, Glycine max
MATSENNNARPQRVAKKRAAAAICELHRNAAKRKRVVLGDLTNVSSNYVAVTEKEIQKQKKVKREQPARPVSTPEKVEERHDPQLCRPYVSDIYEYLRGMEVDPSKRPLTDYVQKIQRDVNANMRGVLVDWLVEVAEEYKLVSDTLYFSVAYIDRFLSLNILSRQRLQLLGVASMLIASKYKKINPPEVEDFCYITDNTYSKEKVVNMEAEILKALKFELGGPTVKTFLRRFSKVAQEGVDTSDLQFEFLSCYLAELSLLDYNCIKFLPSLVAASVVFLARFMFSTKTHPWNSALHQLTRYKPADLKECVLNLHDLYLSRRGASLQAVREKYKQHKFKCVATTPSPPEIPLSFFEFEGQILRQL

SEQ ID NO: 7511 - DNA, 1470 bp, Zea mays
  CDS (1)..(1470)
atggctatgcgaaaagaaaaccctgtgcttaatgcttgtcaagcatccaatggccggatcacgcgagctcaagctgctgcaaatcgccgaagctttggagctttcccttctgttccattgcctgcaaaaaccgaacgaaaacagactgcacaagggaaggcaaaacgaggttcttcatatgacaacaccagtgcaagtgttgcactttcaggcccccagcctaaaaggcgcacagtactcagggatgtgaccaatttgagcaatgctaactctaacaaaagttttgctgctgcaccgaagcttcagacaaagccctctctaaggactggaagaaccgtgagcaaaagcaagccgtgcgcaaaaaagattcctaaaaaaccaccaccagctggtaatggaagtgcattgactaatgttttgaacattgctgaagaaacacaagcggagaagattttggcagagagagtggaacccgttctgttgcttgagaacagggggccactgtcattgcagaatgttgaaaggaacagggacagtgcttgtcatgaggtattctttgaggaaagaaacctcagggataaatgtgaaccttctgtgtcaaagaatggggactcttatgtgttagacattgtagatatcgacaaagataatggcaatcctcaaatgtgtgcttcctacgttgtggagatatactcaaacctaatggcttcagagcttatgagaagaccaagtccaaattacatggagggtttgcaacgggacatcacaaagggcatgagagaaatactcattgattggcttgtggaggtttctgaagaatacaagcttgttccagacacgctgtacctaactgtataccttattgaccggtttctttctcggaactacattgaaagacagagactacaacttgtgggaataacaagcatgcttgttgcctcgaaatatgaagagatatgtgctcctcgagtagaagagttctgtttcataaccgacaatacatacacaaaagcagaggtgctgaaaatggagagccagctgctgaatgacctgggatttaacctttctgttccaacaacaaaaacatttctcaggagattccttagagcggcacaagcatctcgtaaaactccttctatgactttaggatttctggccaattatctcgcggagttgactttgaccgaatatgagttcttgaaatttcttccgtcgttggtggcagcatcggccgtgtttcttgctagatggacgcttgaccaatccgatctcccatggaaccagactctagagcactacacgtcttacaaatgctctgacattcaattgtgtgtctgtgctctacgggaactccagcataacaccagtaactgccctcttaacgccatccgcgagaagtacaggcatcaaaagtttgaatgcgtagcgaacctaacttcaccggagttccctcggtcgttcttcagctga

SEQ ID NO: 7512 - protein, 489 aa, Zea mays
MAMRKENPVLNACQASNGRITRAQAAANRRSFGAFPSVPLPAKTERKQTAQGKAKRGSSYDNTSASVALSGPQPKRRTVLRDVTNLSNANSNKSFAAAPKLQTKPSLRTGRTVSKSKPCAKKIPKKPPPAGNGSALTNVLNIAEETQAEKILAERVEPVLLLENRGPLSLQNVERNRDSACHEVFFEERNLRDKCEPSVSKNGDSYVLDIVDIDKDNGNPQMCASYVVEIYSNLMASELMRRPSPNYMEGLQRDITKGMREILIDWLVEVSEEYKLVPDTLYLTVYLIDRFLSRNYIERQRLQLVGITSMLVASKYEEICAPRVEEFCFITDNTYTKAEVLKMESQLLNDLGFNLSVPTTKTFLRRFLRAAQASRKTPSMTLGFLANYLAELTLTEYEFLKFLPSLVAASAVFLARWTLDQSDLPWNQTLEHYTSYKCSDIQLCVCALRELQHNTSNCPLNAIREKYRHQKFECVANLTSPEFPRSFFS

SEQ ID NO: 7513 - DNA, 1119 bp, Zea mays
  CDS (1)..(1119)
atggagaactctgccgccgccgccgccgaacggccgcgcctcacccgcgcagccgccaagcgctcagccgtcgtcacggctgtggccgtcgccgccaagcgcaagcgcgtcgcgctcagccagctgcccacgctccccaacgccgtgctcggcgcgcacgacgacgacgacgacaagcccgtcaggaagcagcgcctcctccccgccgccaagcccaagcccaagcccaaggcagcgcccgcgcctgccgcgcccgccgccgcggatgacacggatgacgacattcagctctgcaagccctacgcttccgacatctactcctacctccgctccatggagtcgcaggccaagcgccgcctcgctgttgactacatcgcggcggtgcagatcgacgtcacgcccaacatgcgtggcatcctcatcgactggctcgtcgaggtcgccgaggagtacaagctcgtctccgacacgctctacctcaccgtctcctacatcgaccgcttcctctctgccaaagttctcaacaggcagaagctgcagctcctcggcgtctccgccatgctcatcgcatccaagtatgaggagatcagcccgcccaacgtggaggatttctgctacatcaccgataacacctacaccaagcaggaggtagttaagatggagagtgatatactgaatgtcctcaagtttgaggtgggcagtcctaccgccaagacgttcctgaggatgttcatcagatctgcccaagaagacaacaagaagtatcctagcctccagttggagttcctggggagctacctttctgagctgagcttgctggattatggcttgattcgctccttgccgtcacttgttgcagcctcagccgtctttgttgcaaggctgaccctggatccacacacccatccctggagcaagaaggtgcaaacgctaacaggctataagccatctgagttgaaggactgtgttgctgccatacataatttgcagctcaaccggacatgtcaatccatggtggcgatccgggagaaatacaggcaacaccgattcaagggtgtatcagctttgctacctcctgttgagatccctgcatcatacttcaatacactgaaggagtag

SEQ ID NO: 7514 - protein, 372 aa, Zea mays
MENSAAAAAERPRLTRAAAKRSAVVTAVAVAAKRKRVALSQLPTLPNAVLGAHDDDDDKPVRKQRLLPAAKPKPKPKAAPAPAAPAAADDTDDDIQLCKPYASDIYSYLRSMESQAKRRLAVDYIAAVQIDVTPNMRGILIDWLVEVAEEYKLVSDTLYLTVSYIDRFLSAKVLNRQKLQLLGVSAMLIASKYEEISPPNVEDFCYITDNTYTKQEVVKMESDILNVLKFEVGSPTAKTFLRMFIRSAQEDNKKYPSLQLEFLGSYLSELSLLDYGLIRSLPSLVAASAVFVARLTLDPHTHPWSKKVQTLTGYKPSELKDCVAAIHNLQLNRTCQSMVAIREKYRQHRFKGVSALLPPVEIPASYFNTLKE

SEQ ID NO: 7515 - DNA, 1281 bp, Zea mays
  CDS (1)..(1281)
atggcggcgcgggcggctgacgagaacaggagaccggcggcagggaagcccgcgccaggcgtccgagacatggcgagccggcgcgcgctcacggacatcaagaacctcgtcggggctgccccgtacccctgcgccgtcgccaagaagcccatgctgcagaagagcagaagggacgaaaagcagccagcgttggcaagcagccggcccatgacaaggaaattcgccgcctccttggcgagcaagggccaacctgaatgtcagccgatcgtagctgatccagaacccgaagtttgtcaacagaaggaatcagtaggcgatggcaccgttgatattgacgtggaactctacgagctggtcgacgatagtgatagtgacatcgacatgggtgatgagacagagaacaaggacattatgaaccaagatgaatcgctcatggatattgacagtgcagactcggggaacccgcttgcagcaacagaatatgttgaagagctttacaagttttacagagaaaatgaggctaagagttgtgtaaaccctgattacatgtccagtcagcaagatataaatgcaaagatgagagcaattctgattgactggctgattgaggttcactacaagtttgaactgatggacgagacgctatttcttacggtaaacgtaatagatagattcttggaaaaggaagtggttccaaggaagaagctacaactggttggaatcacagctctgcttcttgcttgcaaatatgaggaggtctcagttccagttgttgaggaccttgtgctcatttctgaccgtgcctacacaaaagggcaaattctagaaatggaaaagttgattctgaacacgctgcaattcaacatgtctgttccaacaccttatgtcttcatgaagaggtttctgaaagcagcagacgcagataaacagcttgagctagtgtcatttttcatgctggagctctgcttggtagagtaccaaatgctgaattataggccttcacatctggctgccgctgcggtttatactgcacaatgtgctattaaccgttgccagcaatggacaaaggtttgcgagtcacacagcagatacactggcgaccaactcctggagtgctcgaggatgatggtagactttcaccagaaggctggaaccggcaagctcactggcgtgcacaggaagtacagtacctacaagttcgggtgcgcggccaagattttgcctgcgcagttcatgctggagtcaggagggacagcaccgcctccttcaggtgcaatctaa

SEQ ID NO: 7516 - protein, 426 aa, Zea mays
MAARAADENRRPAAGKPAPGVRDMASRRALTDIKNLVGAAPYPCAVAKKPMLQKSRRDEKQPALASSRPMTRKFAASLASKGQPECQPIVADPEPEVCQQKESVGDGTVDIDVELYELVDDSDSDIDMGDETENKDIMNQDESLMDIDSADSGNPLAATEYVEELYKFYRENEAKSCVNPDYMSSQQDINAKMRAILIDWLIEVHYKFELMDETLFLTVNVIDRFLEKEVVPRKKLQLVGITALLLACKYEEVSVPVVEDLVLISDRAYTKGQILEMEKLILNTLQFNMSVPTPYVFMKRFLKAADADKQLELVSFFMLELCLVEYQMLNYRPSHLAAAAVYTAQCAINRCQQWTKVCESHSRYTGDQLLECSRMMVDFHQKAGTGKLTGVHRKYSTYKFGCAAKILPAQFMLESGGTAPPPSGAI

SEQ ID NO: 7517 - DNA, 1889 bp, Zea mays
  CDS (226)..(1575)
cgcgccgcctttgattgagcagggactgggagagaggagaagagagggtgaaagggggcaagaaaacgcttcttgttgcctttgtgcttcagcggatccgcggtggctgcgcacgccggcggggaagaggagtcgcgggcggcgcgcctccagtcttttttcgcctccgtgctctccgggctcttcggccaggccgaggccgaggacgaggacgaggacgaagagatgcccacgcgcaaccacaacgctgccgcggctgccgctccgcagcatcaccatcacaaccgaggtggtgctcccgctcttggaaagagcaaggccgtgcccggccgagctgatgccatgaaccggcgagcccccctcggcgatattggcaacctcgtcagcgtccgcccagccgaagggaaacctcagctgcaggagcagatcaatcgccccatcacgcgaagcttcggcgctcagctcgtgaagaacgtgcaggcgaatgccgcaatcaagaatgccgcaatcctacccgcgaggcatgcgccgaggcaggaaaggaaggctcctgccaagcagccgcctcctgaggatgtcatagtactcagctccgactctgaacagagcaggacgcagttggagagcagcgctagctccgtccggtcgaggaagaaggtcatcaacaccctttcttctgtgctctcggctcgctcaaaggctgcctgtggaatcactgataagagacggcaagtagcagtgatcgaagacatcgacaagttggacgtcaacaatgagctcgcagttgtggaatacattgaggacatctacacattctacaagattgctcagcatgacagacggccatgtgattatatagacacccaagtcgagatcaaccctaagatgagggctatcctggctggttggataattgaagtacaccacaagttcgagctgatgccggaaactctctacttgaccatgtacatcatcgatcagtacctctcgctgcaaccagtcctgcgaagggagctgcagctggtcggtgtttcagctatgctgatcgcctgcaagtacgaggagatttgggccccagaggtgaacgatttcattcttatatcagacagtgcatacagcagggagcagatcctttcgatggagaagggaatcctgaatagcctggagtggaacctcactgtccctacagtatacatgttccttgttcgttttctgaaggcggcagccttgggcaacaaagttgagaaagagatggagaatatggtcttcttcttcgctgaactggcgctgatgcagtacggcttggtgacgcggctgccttcgctggtcgctgcttcggttgtctacgcagccaggctcactctcaagagggctcccctctggaccgacaccctcaagcaccacacgggcttcagagagtcagagacagagctaatcgagtgcacgaagttgctggtcagcgcacactcgtccgccgctgacagcaagctgaggtctgtatacaagaagtattccagtgagcagttcggaggtgtcgcgcttcgcccacccgcagccgcagtggagatcaagtaaacgaagataacttcgtgctagtgtttgttagtataatgtaatggaaggcgagcctgacattcgctagggtctatccgtctatgtttgcttgtcggggtagtcaagaaagtttgaatgcttgaggcagccgtttgtttggtaggctgttctcagagtccaggtgttatctgacttgtgatggcatgttgtgtttcatgtgatggatatcattagaatcctaatctagtacgatatctattcatgaatataaatggtatttattcatttgttcataaatctgaattgaaaatggccctaaaaaaaaaaaaaaaaaa

SEQ ID NO: 7518 - protein, 449 aa, Zea mays
MPTRNHNAAAAAAPQHHHHNRGGAPALGKSKAVPGRADAMNRRAPLGDIGNLVSVRPAEGKPQLQEQINRPITRSFGAQLVKNVQANAAIKNAAILPARHAPRQERKAPAKQPPPEDVIVLSSDSEQSRTQLESSASSVRSRKKVINTLSSVLSARSKAACGITDKRRQVAVIEDIDKLDVNNELAVVEYIEDIYTFYKIAQHDRRPCDYIDTQVEINPKMRAILAGWIIEVHHKFELMPETLYLTMYIIDQYLSLQPVLRRELQLVGVSAMLIACKYEEIWAPEVNDFILISDSAYSREQILSMEKGILNSLEWNLTVPTVYMFLVRFLKAAALGNKVEKEMENMVFFFAELALMQYGLVTRLPSLVAASVVYAARLTLKRAPLWTDTLKHHTGFRESETELIECTKLLVSAHSSAADSKLRSVYKKYSSEQFGGVALRPPAAAVEIK

SEQ ID NO: 7519 - DNA, 1539 bp, Zea mays
  CDS (1)..(1539)
atgtcgaccatcgctgcctcccgccgctcgtcctcctcgtcctcttccgcgaccgccaagcgccccgcgattgcggacggccccgggggacccaaggcgaccgccgcacaggccaagaagcgcgtggcgctcggcaacatcaccaacgttgccgcgcggggagggagggcttccgttggcggcagccttgggaacgtcatggcgcccaccagcagcgcgaagttgaatccaacggtacccttgaagaagccgtctttggcaacaagtgctcggagtgtgagttcttccatccggggttctgctgacaaaccggcttccatcaagccagctccaccagtagcacgccatggcagcgcaacacaaaggcataacaatgttcctcctcctaaagtgcctaccattgccgatgtgccaagtcgtgctcctgccttggtgtcctgcaccggcttggtgtctcctggacgctcaggagattctgtttcatccgatgagacgatgtcgacttgcgactccatgaaaagcccagactttgagtacgtagacaatcaggacacctcgatgctggcttcgttgcagcgacggacaagtgaacatctgcgaatatcagaggatagagatgttgaagaaaataagcggaagaaaaatgccgtggccccaatggaaattgaccgcatctgtgatgttgacagtgaatatgaggatccacagctgtgcgctactctggcttctgacatttacatgcacttgcgagaggctgagacgaagaaaagaccgtcaactgatttcatggaaacgattcaaaaagatgtcaacccaagcatgagagcaattttgatagactggctcgtggaagttgctgaagaatatcgtcttgttcctgatactttgtacctgacagtcaactacattgaccgttatctttctggcaacgaaatcagccgccaacggctgcaattacttggtgttgcatgcatgcttatagctgcaaaatacgaggagatatgtgcaccacaagtagaagaattctgctacataacagacaatacatatttcagagatgaggttctagatatggaagcttctgtactgaattacttgaagtttgaaatgacagcacctacagcaaagtgctttttgaggagatttgctcgtgctgcacaagcgtgtgatgaggatcctgctttgcatctggagttccttgccaattacatcgctgagctatcactactggagtacagtctactctcttaccctccatcactaatagctgcatcggctattttcttggcgagatttatactacagccaacaaagtatccttggaattccacactcgctcattacacacagtacaaaccgtccaaactgagcgaatgtgtaaaggcattgcatcgcctttgcagcgttggttctggtagcaaccttccagcaatcagagaaaagtacagtcaacataagtacaaatttgttgcaaagaagcagtgtccaccgcagataccctcactcgaattctttcgggacgcgacatgcctagactag

SEQ ID NO: 7520 - protein, 512 aa, Zea mays
MSTIAASRRSSSSSSSATAKRPAIADGPGGPKATAAQAKKRVALGNITNVAARGGRASVGGSLGNVMAPTSSAKLNPTVPLKKPSLATSARSVSSSIRGSADKPASIKPAPPVARHGSATQRHNNVPPPKVPTIADVPSRAPALVSCTGLVSPGRSGDSVSSDETMSTCDSMKSPDFEYVDNQDTSMLASLQRRTSEHLRISEDRDVEENKRKKNAVAPMEIDRICDVDSEYEDPQLCATLASDIYMHLREAETKKRPSTDFMETIQKDVNPSMRAILIDWLVEVAEEYRLVPDTLYLTVNYIDRYLSGNEISRQRLQLLGVACMLIAAKYEEICAPQVEEFCYITDNTYFRDEVLDMEASVLNYLKFEMTAPTAKCFLRRFARAAQACDEDPALHLEFLANYIAELSLLEYSLLSYPPSLIAASAIFLARFILQPTKYPWNSTLAHYTQYKPSKLSECVKALHRLCSVGSGSNLPAIREKYSQHKYKFVAKKQCPPQIPSLEFFRDATCLD

SEQ ID NO: 7521 - DNA, 24 bp, Artificial Sequence
  Primer
atgatgcttgaagggtatacggta

SEQ ID NO: 7522 - DNA, 25 bp, Artificial Sequence
  Primer
ttaggcttctgtcgaaacaatccat

SEQ ID NO: 7523 - protein, 266 aa, Artificial sequence
  Variant (2)..(4): Xaa in position 2 to 4 is any amino acid
  Variant (6)..(12): Xaa in position 6 to 12 is any amino acid
  Variant (14)..(17): Xaa in position 14 to 17 is any amino acid
  Variant (18)..(23): Xaa in position 18 to 23 is any or no amino acid
  Variant (25)..(32): Xaa in position 25 to 32 is any amino acid
  Variant (33)..(37): Xaa in position 33 to 37 is any or no amino acid
  Variant (40)..(40): Xaa in position 40 is any amino acid
  Variant (43)..(43): Xaa in position 43 is any amino acid
  Variant (47)..(48): Xaa in position 47 to 48 is any amino acid
  Variant (50)..(54): Xaa in position 50 to 54 is any amino acid
  Variant (56)..(57): Xaa in position 56 to 57 is any amino acid
  Variant (61)..(67): Xaa in position 61 to 67 is any amino acid
  Variant (72)..(80): Xaa in position 72 to 80 is any amino acid
  Variant (81)..(82): Xaa in position 81 to 82 is any or no amino acid
  Variant (88)..(93): Xaa in position 88 to 93 is any amino acid
  Variant (95)..(95): Xaa in position 95 is any amino acid
  Variant (100)..(102): Xaa in position 100 to 102 is any amino acid
  Variant (104)..(112): Xaa in position 104 to 112 is any amino acid
  Variant (114)..(115): Xaa in position 114 to 115 is any amino acid
  Variant (117)..(124): Xaa in position 117 to 124 is any amino acid
  Variant (126)..(128): Xaa in position 126 to 128 is any amino acid
  Variant (130)..(131): Xaa in position 130 to 131 is any amino acid
  Variant (133)..(133): Xaa in position 133 is any amino acid
  Variant (135)..(138): Xaa in position 135 to 138 is any amino acid
  Variant (140)..(143): Xaa in position 140 to 143 is any amino acid
  Variant (144)..(144): Xaa in position 144 is any or no amino acid
  Variant (147)..(147): Xaa in position 147 is any amino acid
  Variant (149)..(150): Xaa in position 149 to 150 is any amino acid
  Variant (152)..(161): Xaa in position 152 to 161 is any amino acid
  Variant (162)..(167): Xaa in position 162 to 167 is any or no amino acid
  Variant (169)..(173): Xaa in position 169 to 173 is any amino acid
  Variant (175)..(186): Xaa in position 175 to 186 is any amino acid
  Variant (187)..(187): Xaa in position 187 is any or no amino acid
  Variant (190)..(191): Xaa in position 190 to 191 is any amino acid
  Variant (194)..(194): Xaa in position 194 is any amino acid
  Variant (196)..(206): Xaa in position 196 to 206 is any amino acid
  Variant (207)..(221): Xaa in position 207 to 221 is any or no amino acid
  Variant (223)..(259): Xaa in position 223 to 259 is any amino acid
  Variant (260)..(264): Xaa in position 260 to 264 is any or no amino acid
YXXXIXXXXXXXEXXXXXXXXXXYXXXXXXXXXXXXXMRXILXDWLXXVXXXXXLXXETLXXXXXXXDRFLXXXXXXXXXXXLQLVGXXXXXXAXKYEEXXXPXXXXXXXXXDXXYXXXXXXXXEXXXLXXLXFXXXXPXXXXXFLXRXXKXXXXXXXXXXXXXXXXLXXXXXEXXXXXXXXXXXXXPSXXAAXAXXXXXXXXXXXXXXXXXXXXXXXXXXWXXXXXXXXXXXXXXXXXXXXXXXXXXXXXXXXXXXXXXXXXXKY

SEQ ID NO: 7524 - DNA, 1056 bp, Saccharomyces cerevisiae
  CDS (1)..(1056)
atgttcaagagatttagcaaaaagaaggaggctccagaagacccaaaaaatttgattaatattgataagcctatcaaagaacttcctgcttcgatagctattccaaaagaaaaaccacttacaggtgagcaacaaaaaatgtatgacgaagtgctaaaacatttcagtaaccctgacttgaaggtttatacaagtgaaaaaaataagtcggaggatgatcttaaacccttagaggaagaagaaaaggcatggttgacaagagaatgttttttacgttacctaagggctactaaatgggtgctaaaagactgtatcgatagaatcaccatgactctagcgtggagaagagaattcggtattagtcatttaggtgaagagcatggtgataaaataactgctgacttggtggccgtcgagaacgaatcaggtaagcaggtgattttgggttacgaaaacgatgctagacctatcttatatttgaaaccgggcagacaaaatacaaagacttctcacagacaggtacagcacttggtcttcatgttggaaagagttatcgattttatgccagctggtcaagactctctagctttgctaatagactttaaagattaccctgatgttcctaaagtacctggcaatagtaaaatcccacctattggtgtagggaaagaagtgctgcatattctacaaactcattatccagaaagactaggaaaagcacttttgacgaatattccttggttagcatggactttcttgaagttaattcacccttttattgacccactgacccgtgaaaagctagtttttgatgaaccatttgttaaatatgtccctaagaacgaactagattcgttgtatggtggtgatctgaaattcaagtacaatcatgatgtttattggccagctctggtggaaaccgcgcgtgaaaaaagagatcattattttaagaggtttcaaagcttcggtggtattgtaggtttaagtgaggttgatttaagaggtactcatgaaaaacttctttacccagtaaaatcggaaagcagtaccgtgtaa

SEQ ID NO: 7525 - protein, 351 aa, Saccharomyces cerevisiae
MFKRFSKKKEAPEDPKNLINIDKPIKELPASIAIPKEKPLTGEQQKMYDEVLKHFSNPDLKVYTSEKNKSEDDLKPLEEEEKAWLTRECFLRYLRATKWVLKDCIDRITMTLAWRREFGISHLGEEHGDKITADLVAVENESGKQVILGYENDARPILYLKPGRQNTKTSHRQVQHLVFMLERVIDFMPAGQDSLALLIDFKDYPDVPKVPGNSKIPPIGVGKEVLHILQTHYPERLGKALLTNIPWLAWTFLKLIHPFIDPLTREKLVFDEPFVKYVPKNELDSLYGGDLKFKYNHDVYWPALVETAREKRDHYFKRFQSFGGIVGLSEVDLRGTHEKLLYPVKSESSTV

SEQ ID NO: 7526 - DNA, 1578 bp, Danio rerio
  CDS (1)..(1578)
atggcggaggcaggacaggcggaatcagagcaggacatcgagatcaagatccaagaaacacggcagaggtttaaaagcgagtatgttgaagcacaagagagtcaggagaagtacgacagcagagacgtggagaagctgtttcgtgacgacgctctggtggagggatacctgacctggagacacttcatagtggaggacaccttaaagatgatcgacgagagcctgcagtggaggagagagttcagcgtcaacgatctgacggagagcagcattccccgctggatgtttgagatcggtgccgtttacctgcacggatacgacaaagaaggaaacaaactcttttggttcaaagtgaagctccacattaaggacccaaagacggtgttggataagaagcgttatgtggccttctggttggaacgttatgccaaacgcgagccagggatgccgctgaccgtcgtgttcgacatgtccgagtctggactcagtaacatagacatggactttgtgaagtacatcataagctgcttcaaagtgtactacccaaagtttctttccaaaatgatcatgtacgagatgccttggatcatgaatgctgcctggaagatcgtgaagacgtggctcggccctgatgccatcagtaaactcaagtttgtctccaagagtgacatccagacgtttgtgggccccgaacaccttccaccatacatgggaggaacggaccagttcaagtacagttatccgcctctgccggacgatgacttccagtctccgatctgtgaaaacggtccaatcatcagcgaggatgaaagtgaccttaaagatgccgaatcggagtccaaagagactctagagtccagtttcaacgccgaccaatccatcaaaccaaagaaggtgaattttatcgaagacggtcagaggtcggaagagcttgacagagaatctgtacggttgaagggagccagaaaacctaccaccactttcaaggccacattaatgcacatcagtccggctgaagagctcagtttcggtgcatcagaatcagagaagaagtgtttgatcgtcctcaacaacgtcactaaaaaccacgtggcctttaaggtgcgaacgacggctccagaaaagtaccgtgtgaagcccagtaacagcagctgtgagcctggagccagtgtggacatcgttgtttcacttcacggaggcttccaggcgtctccgcaggaccgctttctggtgatggcggcagagatggagagcagcagtggagctgccgccactgatctggctcagttctggaaggaggtttcaaaacccaaaatcatggagcacaggctccgctgtcacgttttggagagtccaaagtctattctgagcaattcatttgagtttccatctagtcctacaacaaacgtcaatgagcatcaggatctgcagagcacgttgatgagacttctggccactaacgctgcactggagcagaagctggactggtgtttgtggacgcagaaagtactgctgcttctgctgttgtttctgctggcgctcagcttcaccaccgcatacacactatggacatcatga

SEQ ID NO: 7527 - protein, 525 aa, Danio rerio
MAEAGQAESEQDIEIKIQETRQRFKSEYVEAQESQEKYDSRDVEKLFRDDALVEGYLTWRHFIVEDTLKMIDESLQWRREFSVNDLTESSIPRWMFEIGAVYLHGYDKEGNKLFWFKVKLHIKDPKTVLDKKRYVAFWLERYAKREPGMPLTVVFDMSESGLSNIDMDFVKYIISCFKVYYPKFLSKMIMYEMPWIMNAAWKIVKTWLGPDAISKLKFVSKSDIQTFVGPEHLPPYMGGTDQFKYSYPPLPDDDFQSPICENGPIISEDESDLKDAESESKETLESSFNADQSIKPKKVNFIEDGQRSEELDRESVRLKGARKPTTTFKATLMHISPAEELSFGASESEKKCLIVLNNVTKNHVAFKVRTTAPEKYRVKPSNSSCEPGASVDIVVSLHGGFQASPQDRFLVMAAEMESSSGAAATDLAQFWKEVSKPKIMEHRLRCHVLESPKSILSNSFEFPSSPTTNVNEHQDLQSTLMRLLATNAALEQKLDWCLWTQKVLLLLLLFLLALSFTTAYTLWTS

SEQ ID NO: 7528 - DNA, 1530 bp, Xenopus tropicalis
  CDS (1)..(1530)
atggctgaggacaaggaacaactaattcaggagacaagaaaaaggtttactcaggagtatctgcaagataaggctgacagatatgattctcgtgatgtggaaagactacagaaggatgacaccttggtggaaagctaccttatgtggaggcattatgtaacagaggaagctctaaagatgatggatgaaagcctgaaatggaggaaagacattggtgtaaatgacttgaatgaatccactatccctaagtggtgttttgagactggagcatcttatctgcatggatatgataaagaaggcaataaattgttgtggctcaaggtaaagctccatgtacgtgatggtaaaacaactgaggacaagaaaaagtttgttgcattctggttggagcgctatgccaggagagaaccagggaagttcataactgttgtttttgacatggttgactcaggactaagcaatgtagatatggattttgttcggtttgtcgtcaactcttttaagacctactaccccagatatctgtctaagatggtaatttatgaaatgccgtggatattgaatgctgccttcaaaattgtgaaaagttggcttggtccagaggctataagtttgctgaaatttgcaaacaagaatcaagttcaggactacatcagtgcagaatacttgccacctcatatgggaggaacagatcccttcaagtatagttatcctccattgcctgatgatgactttcaaacgccactgtgtgagaatggaccagtagcaagtgaggatgattccgaaagtaaactgagtgaatcagatctccgtgacaccgtagatttaagtgtgccaaaaaagataagcatcagcgacgaccaaattaaacaggaggatgtggaaaaaaatgatgtaaagcaaaaaaacaacaggaaggcatcaactgtattcaaaggacctttgttacatatcagtccagcagaagaactgcattttgggtccaaggaaagtggagagcgaaaatgtgtaattgtgctgaataatgtaacaaaaaacacagtagcatttaaggtgagaacaacagctcctgaaaaatacagagtcaaaccaagtaacagcagctgcgaaccaggatccacagttgatattgtggtgtctctgcatgcagcctttgtagcatctctccaggacagattcttagtaatggcggcagaaatggagcagccctccggtgccagcacacaagaactcacacagttttggaaggaggtgcccaggagtaaagtcatggagcataggttaagatgccacgttgttgaaactagcaagcctgcctcattaatcctaaaatcaaacacaatgaaccactctgtatcggacagtgacgacttgcattttaagctcaatcagctgttggaaactaacagaaggttagaagcacagatggggcactgcctctggtttcagcacatgttagccaccttattatccattctggtcgccattgttgctgctggagtgtatataacgaaacaccaggactgttaa

SEQ ID NO: 7529 - protein, 509 aa, Xenopus tropicalis
MAEDKEQLIQETRKRFTQEYLQDKADRYDSRDVERLQKDDTLVESYLMWRHYVTEEALKMMDESLKWRKDIGVNDLNESTIPKWCFETGASYLHGYDKEGNKLLWLKVKLHVRDGKTTEDKKKFVAFWLERYARREPGKFITVVFDMVDSGLSNVDMDFVRFVVNSFKTYYPRYLSKMVIYEMPWILNAAFKIVKSWLGPEAISLLKFANKNQVQDYISAEYLPPHMGGTDPFKYSYPPLPDDDFQTPLCENGPVASEDDSESKLSESDLRDTVDLSVPKKISISDDQIKQEDVEKNDVKQKNNRKASTVFKGPLLHISPAEELHFGSKESGERKCVIVLNNVTKNTVAFKVRTTAPEKYRVKPSNSSCEPGSTVDIVVSLHAAFVASLQDRFLVMAAEMEQPSGASTQELTQFWKEVPRSKVMEHRLRCHVVETSKPASLILKSNTMNHSVSDSDDLHFKLNQLLETNRRLEAQMGHCLWFQHMLATLLSILVAIVAAGVYITKHQDC

SEQ ID NO: 7530 - DNA, 1227 bp, Saccharomyces cerevisiae
  CDS (1)..(1227)
atgtcctttgatagacagttgaccgaagaccaggaggtcgtccttaagcaaatttggacacaccttttccatctgtggcaagttcccgtggatggaactcatattttccctaataactccctccactcctcgtccacccctgctaagaagaagaaatcatcctggtttagcaagcttcagtcctcagaccatacacaggactccagcgaagccgctgaagcggcacacctctatgaaaagggcaagatacacaaggcactagccaatctagacccgcaaacgaccaagaagcagttctggcacgatatcaagaatgaaactccagacgccaccattttgaagtttatcagagccagaaagtggaacgcagacaagaccatcgccatgttgggtcacgatttgtactggcgcaaggacactattaacaagatcataaacggtggcgaaagagctgtgtatgagaataacgagaccggtgtcattaagaacctggaattgcaaaaggccaccatccagggttacgacaatgacatgaggccagtcatccttgtgagacctagattacatcattcttccgaccaaactgaacaggagctggaaaaattctccctgttggtcatcgagcaatcaaagcttttcttcaaagaaaactaccccgcatccaccaccatcttgttcgatctgaacgggttctccatgtccaatatggactatgcccccgtcaagtttctaatcacttgttttgaggctcactacccggaatctttgggccatctacttatccataaggccccttggatctttaacccgatttggaacatcatcaagaattggctggatccggtcgtcgcgtccaagattgttttcactaagaatatcgacgaattgcacaagtttatccaaccccaatacatccctaggtatctgggcggagaaaatgacaatgatttggatcattacactccaccagatggctctttggacgtccatctgaaagacaccgagactcgcgctatgatcgaaaaggagagagaagaattggtcgaacaattcttgactgtcactgcccaatggattgaacaccagccattgaacgatccagcatacattcaactgcaggagaaaagagtacaactttccaccgctctttgtgaaaactactccaagttagatccgtacatcagatcaagatccgtttatgactacaatggttctctaaaagtttga

SEQ ID NO: 7531 - protein, 408 aa, Saccharomyces cerevisiae
MSFDRQLTEDQEVVLKQIWTHLFHLWQVPVDGTHIFPNNSLHSSSTPAKKKKSSWFSKLQSSDHTQDSSEAAEAAHLYEKGKIHKALANLDPQTTKKQFWHDIKNETPDATILKFIRARKWNADKTIAMLGHDLYWRKDTINKIINGGERAVYENNETGVIKNLELQKATIQGYDNDMRPVILVRPRLHHSSDQTEQELEKFSLLVIEQSKLFFKENYPASTTILFDLNGFSMSNMDYAPVKFLITCFEAHYPESLGHLLIHKAPWIFNPIWNIIKNWLDPVVASKIVFTKNIDELHKFIQPQYIPRYLGGENDNDLDHYTPPDGSLDVHLKDTETRAMIEKEREELVEQFLTVTAQWIEHQPLNDPAYIQLQEKRVQLSTALCENYSKLDPYIRSRSVYDYNGSLKV

SEQ ID NO: 7532 - DNA, 915 bp, Saccharomyces cerevisiae
  CDS (1)..(915)
atggttacacaacaagaaaaggaatttttagaatcctaccctcaaaactgtcctccagatgccttgcctggtactccaggaaatttagacagcgctcaagagaaggcattggcagaactaagaaaacttttggaagacgctggtttcattgaacgtttagacgattcaactttactacgttttttgagagccagaaaatttgatgttcaattggctaaagaaatgtttgaaaactgcgaaaaatggaggaaggattatggtaccgacactatcttgcaagattttcattatgatgaaaaaccattgattgccaaattctacccacaatattatcataaaaccgataaagatggccgcccagtatattttgaagaattaggtgctgttaacttacatgaaatgaacaaggttacctctgaagagaggatgttgaaaaacttggtttgggaatacgaatctgtcgttcaatacagattacctgcctgttcaagagctgctggtcacctagtggaaacttcatgtacaattatggatttgaaaggtatctccatatctagtgcatacagtgttatgtcatatgttagggaagcctcctacataagtcaaaactattaccccgaacgtatgggtaaattttacatcatcaacgcgccattcggtttctctaccgcatttaggctatttaaacctttcttggatccagtcactgtttcaaagatttttatcttgggttcttcttaccagaaggaattattaaagcaaattccagctgaaaacttaccagtcaaatttggcggtaagtctgaagttgatgaatccaagggtgggttatacctatccgatatcggtccatggagggatccaaagtatattggaccggaaggtgaagctccggaagccttttcgatgaaatga

SEQ ID NO: 7533 - protein, 304 aa, Saccharomyces cerevisiae
MVTQQEKEFLESYPQNCPPDALPGTPGNLDSAQEKALAELRKLLEDAGFIERLDDSTLLRFLRARKFDVQLAKEMFENCEKWRKDYGTDTILQDFHYDEKPLIAKFYPQYYHKTDKDGRPVYFEELGAVNLHEMNKVTSEERMLKNLVWEYESVVQYRLPACSRAAGHLVETSCTIMDLKGISISSAYSVMSYVREASYISQNYYPERMGKFYIINAPFGFSTAFRLFKPFLDPVTVSKIFILGSSYQKELLKQIPAENLPVKFGGKSEVDESKGGLYLSDIGPWRDPKYIGPEGEAPEAFSMK

SEQ ID NO: 7534 - DNA, 768 bp, Arabidopsis thaliana
  CDS (1)..(768)
atggaaaacaaagagaccaagcaagaaccagcagcagcagctgagcaaaagaccgttccgttgatcgaagatgagatcgagaggagcaaagtcgggatcatgagagctctctgcgaccgacaagatcctgaaactaaggaggtggatgatctgatgataaggaggtttctgagagcgcgtgacctggacattgaaaaggcttcaacgatgtttctaaattacctgacttggaagagaagcatgctcccaaaggggcacataccagaagcagagattgcaaatgatctatcgcataacaagatgtgtatgcaaggtcatgacaagatgggtcgacctatcgctgttgccattgggaacagacataacccttccaaaggcaaccctgacgagttcaagcgttttgttgtctacacgctcgagaagatttgtgctagaatgccgagaggtcaagagaaattcgtagcaattggagatctgcaaggctggggatattctaattgtgacatccgtggctaccttgctgctctttccactttgcaggattgttacccagagagattagggaaactctatatagttcatgccccctacattttcatgaccgcatggaaggtcatttatccttttatcgacgccaacaccaagaaaaagattgttttcgtggagaacaagaaactcactccaacgctgcttgaagacatagacgaaagccaacttcccgacatctacggaggcaaattgccacttgttcctattcaggagacctga

SEQ ID NO: 7535 - protein, 255 aa, Arabidopsis thaliana
MENKETKQEPAAAAEQKTVPLIEDEIERSKVGIMRALCDRQDPETKEVDDLMIRRFLRARDLDIEKASTMFLNYLTWKRSMLPKGHIPEAEIANDLSHNKMCMQGHDKMGRPIAVAIGNRHNPSKGNPDEFKRFVVYTLEKICARMPRGQEKFVAIGDLQGWGYSNCDIRGYLAALSTLQDCYPERLGKLYIVHAPYIFMTAWKVIYPFIDANTKKKIVFVENKKLTPTLLEDIDESQLPDIYGGKLPLVPIQET

SEQ ID NO: 7536 - DNA, 945 bp, Arabidopsis thaliana
  CDS (1)..(945)
atgaattctgattctaataaatcatcttcaaatggatttgagaaatctttgacaccagaggagtatctaaacaagataaatgaagtgaggacattactagggccattgactgagaagtcatctgagttttgttcagatgccgccattactcggtatttggctgcgcgtaacggccatgtcaagaaagcaactaaaatgcttaaagaaacactaaaatggagggctcaatacaaacctgaggagattcgatgggaggagatagcacgagaagctgagaccggaaaaatataccgagctaattgtaccgataagtatggaagaacagttcttgttatgagaccaagttgccagaatacaaaatcatataaagggcagattagaatcttggtgtactgtatggaaaatgcaatcttgaacctaccagataaccaagagcaaatggtttggctaatcgattttcacggtttcaacatgtctcatatctccttgaaagtgtctcgagaaaccgctcatgtgttacaagaacattaccctgaacgcttaggcttggccattgtatacaacccgcctaagatttttgagtcgttttataagatggtgaaaccatttttagagccaaagaccagcaacaaggtgaaatttgtctactcagatgataacctcagcaacaagcttctggaggatcttttcgatatggagcaactcgaggttgcatttggtggaaaaaacagcgatgcgggtttcaattttgagaaatatgctgagagaatgagagaggatgatttgaagttctatggaaacaccacagtgtcatcaacctcagctcatttgactaactcagattctgaagtttcagactctgagatgaagtatttggaggacaaagaagatgagactatagagaatggaactttgcaatctcctttagatacaacaaaaacctaa

SEQ ID NO: 7537 - protein, 314 aa, Arabidopsis thaliana
MNSDSNKSSSNGFEKSLTPEEYLNKINEVRTLLGPLTEKSSEFCSDAAITRYLAARNGHVKKATKMLKETLKWRAQYKPEEIRWEEIAREAETGKIYRANCTDKYGRTVLVMRPSCQNTKSYKGQIRILVYCMENAILNLPDNQEQMVWLIDFHGFNMSHISLKVSRETAHVLQEHYPERLGLAIVYNPPKIFESFYKMVKPFLEPKTSNKVKFVYSDDNLSNKLLEDLFDMEQLEVAFGGKNSDAGFNFEKYAERMREDDLKFYGNTTVSSTSAHLTNSDSEVSDSEMKYLEDKEDETIENGTLQSPLDTTKT

SEQ ID NO: 7538 - DNA, 2052 bp, Arabidopsis thaliana
  CDS (1)..(2052)
atggctcaagaagagatacagaaacctactgcctctgttccagtggttaaggaggaaactcctgccccggttaaggaggttgaggtgccggttactacggagaaagctgtggctgcgcctgctccggaagctacggaggagaaagttgtgtctgaggtggcggtgcctgaaacagaggtgacggcggtgaaagaggaggaggttgcgacgggaaaggagatcttgcaatcggagtcgtttaaggaggaaggctatttggcttctgaattacaggaagctgagaagaatgctttggctgagttaaaggagttggttagggaggctttgaacaagcgtgaattcaccgcgccaccgccaccaccagctccggtaaaggaagagaaagttgaggagaagaaaacagaggaaacagaggaaaagaaggaagaagttaaaacagaggaaaaatctcttgaggctgaaaccaaagaagaggagaaatctgctgctccggccaccgtagagaccaagaaagaagagatcttggccgctccggctccgatcgtcgcagagaccaagaaggaagagacaccagttgctcctgctccggtagagactaaaccggctgctccggtcgttgcagagacaaagaaggaagaaatattaccagctgctccggtcaccacagagaccaaggtggaagagaaagtcgttccagtagaaaccacaccggctgctccagtcaccacagagaccaaggaagaagagaaagccgctccggtcaccacagagaccaaggaggaagagaaagcagctccgggagagaccaagaaagaagagaaagcaaccgcctctactcaggtcaagagggcctcaaaatttattaaagatatatttgtctcagtcaccactagcgagaagaagaaggaagaagagaaaccagcagtagtaacaatcgagaaggctttcgcagctgatcaagaagaagaaacaaaaaccgttgaagcagtcgaagaatcaatcgtctccatcactcttccagagacagctgcatacgtagagccagaagaagtctcaatctggggaatcccacttctagaggacgaaagatccgacgtgatcctcctcaaattcctccgtgcacgtgacttcaaggtcaaagaagccttcacgatgctgaaaaacaccgtccaatggcgcaaagagaacaagatcgacgacctagtctcagaagatcttgaaggaagcgagtttgagaagttggtgttcactcacggtgtcgacaaacaaggacatgtcgtgatctatagctcgtacggtgagtttcagaacaaggagattttctcagataaagagaagcttagcaagtttctcaaatggaggattcagttccaagagaagtgtgtgaggtctcttgactttagccctgaggctaagtcatcgttcgtgttcgttagtgacttcaggaacgctcctggacttggtcagagagcattgtggcagttcattaaacgcgccgttaagcaattcgaagataactatccagagtttgtcgctaaagagctgttcattaatgtcccatggtggtacattccttactacaaaacattcggaagtatcattacatcgccaaggacaaggagcaagatggtcctttctggtccatccaaatccgctgagaccattttcaaatacgtagctcctgaagtagtcccggttaagtatggtggactcagcaaagatagtccattcaccgttgaagatggagtcaccgaggccgtagttaaatcgacatctaaatataccattgatttgcctgctacagagggttccacgctctcatgggagcttagggttttgggtgcggacgtgagctacggagctcaatttgagccaagcaatgaggcaagctacaccgtgattgtctctaagaaccggaaggtcggtttaactgatgaaccggtgataaccgattctttcaaggcaagtgaggcgggaaaggtcgtgatcacgattgacaaccaaacctttaagaagaagaaggtgctctacaggtccaaaacccaagcataa

SEQ ID NO: 7539 - protein, 683 aa, Arabidopsis thaliana
MAQEEIQKPTASVPVVKEETPAPVKEVEVPVTTEKAVAAPAPEATEEKVVSEVAVPETEVTAVKEEEVATGKEILQSESFKEEGYLASELQEAEKNALAELKELVREALNKREFTAPPPPPAPVKEEKVEEKKTEETEEKKEEVKTEEKSLEAETKEEEKSAAPATVETKKEEILAAPAPIVAETKKEETPVAPAPVETKPAAPVVAETKKEEILPAAPVTTETKVEEKVVPVETTPAAPVTTETKEEEKAAPVTTETKEEEKAAPGETKKEEKATASTQVKRASKFIKDIFVSVTTSEKKKEEEKPAVVTIEKAFAADQEEETKTVEAVEESIVSITLPETAAYVEPEEVSIWGIPLLEDERSDVILLKFLRARDFKVKEAFTMLKNTVQWRKENKIDDLVSEDLEGSEFEKLVFTHGVDKQGHVVIYSSYGEFQNKEIFSDKEKLSKFLKWRIQFQEKCVRSLDFSPEAKSSFVFVSDFRNAPGLGQRALWQFIKRAVKQFEDNYPEFVAKELFINVPWWYIPYYKTFGSIITSPRTRSKMVLSGPSKSAETIFKYVAPEVVPVKYGGLSKDSPFTVEDGVTEAVVKSTSKYTIDLPATEGSTLSWELRVLGADVSYGAQFEPSNEASYTVIVSKNRKVGLTDEPVITDSFKASEAGKVVITIDNQTFKKKKVLYRSKTQA

SEQ ID NO: 7540 - DNA, 1722 bp, Arabidopsis thaliana
  CDS (1)..(1722)
atggctcaagaggaagtacagaaatcggctgatgtcgctgctgctccggtggtgaaggagaaacctattaccgataaggaggttactattcctacccctgtggcagagaaagaggaagttgctgctcctgtctctgatgagaaggcggttccagagaaggaggtgactccggagaaggaagccccagcggcggaagcggagaaatctgtttcggtgaaggaggaagagacggttgttgtagctgagaaggttgttgttttaactgctgaggaagttcagaagaaggcacttgaggagtttaaggagcttgtaagggaggctttgaacaaacgtgaattcactgctccggtgacgccggttaaggaagagaaaacagaggagaagaaaacagaggaggaaactaaagaggaagagaaaacagaggagaagaaagaagagacaacgactgaggttaaggttgaagaagagaaaccggcggttccagcggcggaggaggagaaatcatcagaggctgctccggttgagaccaaatctgaggagaaacctgaagagaaagcagaggtaacaaccgagaaagcatccagtgccgaagaagatggaaccaagaccgtggaagcaatcgaagaatctatcgtctctgtttcaccacctgaatccgccgtagcacctgtcgtggtagagactgtcgccgttgctgaggcagagccagtggagccggaagaagtctcgatctggggagttccactactccaagacgagagatctgacgtgatcctcacgaaattcctccgtgcaagagactttaaggtcaaagaagctttaaccatgcttaaaaacaccgtccagtggcgtaaagaaaacaaaatcgacgaactcgttgaatccggagaagaagtgagtgagttcgagaagatggtgtttgctcacggtgttgacaaagaaggacacgtcgtgatctacagttcttacggtgagtttcagaacaaggagcttttctccgacaaggagaagcttaacaagttcctcagctggaggattcagctacaagagaagtgtgtgagagctattgatttcagcaaccctgaagcgaagtcttcgtttgtgttcgtcagcgacttcaggaacgctccaggacttggtaaaagagccttgtggcaattcatcagacgcgctgttaaacaattcgaggacaattatcctgaattcgccgctaaagagctattcatcaatgtcccatggtggtacattccatactacaaaacattcggatctatcatcacatccccaaggactaggagcaagatggtccttgctggtccatccaaatctgccgatactattttcaaatacatagctcctgaacaagttcccgttaaatacggtggacttagcaaagatactcctttgaccgaagaaaccataacggaagccatcgttaaaccggcagcaaactacactattgaattgcctgcttctgaggcttgcacgctttcatgggagcttagggttttgggtgctgatgtgagctacggagctcagtttgagccaaccaccgaaggaagctatgctgtgatcgtctctaagacacggaagattggatcaaccgatgaaccggtgataaccgattcttttaaggtgggtgaaccgggaaagattgtgatcacaatcgacaaccagacttccaagaagaagaaagtgctctacaggttcaaaactcaataa

SEQ ID NO: 7541 - protein, 573 aa, Arabidopsis thaliana
MAQEEVQKSADVAAAPVVKEKPITDKEVTIPTPVAEKEEVAAPVSDEKAVPEKEVTPEKEAPAAEAEKSVSVKEEETVVVAEKVVVLTAEEVQKKALEEFKELVREALNKREFTAPVTPVKEEKTEEKKTEEETKEEEKTEEKKEETTTEVKVEEEKPAVPAAEEEKSSEAAPVETKSEEKPEEKAEVTTEKASSAEEDGTKTVEAIEESIVSVSPPESAVAPVVVETVAVAEAEPVEPEEVSIWGVPLLQDERSDVILTKFLRARDFKVKEALTMLKNTVQWRKENKIDELVESGEEVSEFEKMVFAHGVDKEGHVVIYSSYGEFQNKELFSDKEKLNKFLSWRIQLQEKCVRAIDFSNPEAKSSFVFVSDFRNAPGLGKRALWQFIRRAVKQFEDNYPEFAAKELFINVPWWYIPYYKTFGSIITSPRTRSKMVLAGPSKSADTIFKYIAPEQVPVKYGGLSKDTPLTEETITEAIVKPAANYTIELPASEACTLSWELRVLGADVSYGAQFEPTTEGSYAVIVSKTRKIGSTDEPVITDSFKVGEPGKIVITIDNQTSKKKKVLYRFKTQ

SEQ ID NO: 7542 - DNA, 1473 bp, Arabidopsis thaliana
  CDS (1)..(1473)
atggctgaagaacctactactaccactctcgttacaccggaaaagctaccttctccgagcctcacgccttctgaagtatctgaatctactcaagatgccctaccgacagagacagaaactctggagaaagtgactgagactaatccaccggaaactgcagataccaccaccaagccagaagaagaaaccgcggcagagcatcatccaccgacagtgacggaaacagaaactgcatcgacggagaaacaagaggttaaagacgaagcatcgcagaaagaagtagctgaagagaaaaagagtatgattccacagaatcttggttcattcaaagaagaaagcagcaaactttctgatctatctaattccgagaagaaatcactcgatgaactaaaacatctagttcgagaagctctagacaatcaccaattcaccaacacaccagaagaagtcaagatttgggggattccattacttgaagacgatagaagcgacgtcgttttgttaaaattcctaagagctagggagttcaaggtgaaagattcgtttgctatgctcaagaacacaatcaagtggagaaaggagttcaagatcgatgaattggtcgaggaagatcttgtggatgatcttgacaaggttgtgtttatgcatggacatgaccgagaaggtcaccctgtttgttacaatgtctatggtgagtttcagaacaaggagctttataataagacgttttctgatgaggaaaagaggaaacatttcttgaggactaggattcagttcttggagaggagtataaggaagctagattttagctctggtggggtttctactatttttcaggttaatgatatgaagaattctccggggttagggaagaaagagcttagatcagctactaagcaagctgttgagttgcttcaggacaattaccctgagtttgtcttcaaacaggcttttatcaatgttccttggtggtaccttgtgttttatactgtgattggtccgttcatgacaccaagatcaaagagcaagcttgtgtttgctggtccttcgcgttcagctgaaaccctattcaaatacatatcacccgagcaagttccagtacaatatggtggattgagtgttgatccttgcgactgcaatccagacttttcgttggaagattcagcctctgagatcactgttaagcccggaacaaaacaaactgttgagatcataatctatgagaaatgtgaacttgtgtgggagataagggtaactggatgggaagtgagctacaaggctgaatttgtgccggaagagaaagatgcttacacggtggttatacaaaaaccgaggaagatgagaccatccgatgaaccggtgttaacccatagcttcaaagtgaatgagcttggcaaggttttactcacagtagacaacccaacctctaagaagaagaagctcgtttacaggttcaatgtcaaacctctctaa

SEQ ID NO: 7543 - protein, 490 aa, Arabidopsis thaliana
MAEEPTTTTLVTPEKLPSPSLTPSEVSESTQDALPTETETLEKVTETNPPETADTTTKPEEETAAEHHPPTVTETETASTEKQEVKDEASQKEVAEEKKSMIPQNLGSFKEESSKLSDLSNSEKKSLDELKHLVREALDNHQFTNTPEEVKIWGIPLLEDDRSDVVLLKFLRAREFKVKDSFAMLKNTIKWRKEFKIDELVEEDLVDDLDKVVFMHGHDREGHPVCYNVYGEFQNKELYNKTFSDEEKRKHFLRTRIQFLERSIRKLDFSSGGVSTIFQVNDMKNSPGLGKKELRSATKQAVELLQDNYPEFVFKQAFINVPWWYLVFYTVIGPFMTPRSKSKLVFAGPSRSAETLFKYISPEQVPVQYGGLSVDPCDCNPDFSLEDSASEITVKPGTKQTVEIIIYEKCELVWEIRVTGWEVSYKAEFVPEEKDAYTVVIQKPRKMRPSDEPVLTHSFKVNELGKVLLTVDNPTSKKKKLVYRFNVKPL

SEQ ID NO: 7544 - DNA, 891 bp, Arabidopsis thaliana
  CDS (1)..(891)
atgtttcgctggaagaattcttctcaaaccgaacaagagcagaaagaggcagctctcagagaggcaaagatgaaagagcttaagactctcataggtcagctttctggaaggaattcactgtattgttcagatgcatgtctgaagagatatctggaagctaggaattggaatgtaggcaaagccaagaagatgctcgaggagacgctcaaatggagatcgagttttaaacccgaggaaatccgatggaatgaagtttcaggtgaaggtgagactggtaaggtttacaaagctggattccatgacaggcatggaagaacggttcttatactgagacccggcttgcagaacacaaaatcgttggagaaccagatgaaacatctggtgtatctcattgagaatgctattctgaatctgccagaggatcaagaacagatgtcttggcttattgacttcacgggttggtcaatgagcactagtgtgcctattaaatctgccagagaaactattaatattctgcaaaatcactaccctgagagactagctgtagctttcctctataatcctccaagactctttgaggcgttctggaagattgtgaagtacttcattgatgcaaagacattcgtcaaggtgaagtttgtttacccaaagaactcggaaagcgtggagcttatgagcacatttttcgacgaggaaaatctcccaaccgaatttggagggaaagctttgttgcagtataactatgaagagttctccaagcaaatgaaccaagacgatgttaaaactgctaacttttggggattgggtcacagtaacaataaccagctgcacgcgagcaacgggttttctggagctgagattgcccctgagccaatccaaaaccacccttga

SEQ ID NO: 7545 - protein, 296 aa, Arabidopsis thaliana
MFRWKNSSQTEQEQKEAALREAKMKELKTLIGQLSGRNSLYCSDACLKRYLEARNWNVGKAKKMLEETLKWRSSFKPEEIRWNEVSGEGETGKVYKAGFHDRHGRTVLILRPGLQNTKSLENQMKHLVYLIENAILNLPEDQEQMSWLIDFTGWSMSTSVPIKSARETINILQNHYPERLAVAFLYNPPRLFEAFWKIVKYFIDAKTFVKVKFVYPKNSESVELMSTFFDEENLPTEFGGKALLQYNYEEFSKQMNQDDVKTANFWGLGHSNNNQLHASNGFSGAEIAPEPIQNHP

SEQ ID NO: 7546 - DNA, 1203 bp, Arabidopsis thaliana
  CDS (1)..(1203)
atggggaagaaagatgagaaagtcgaagctgttcttcgcttggtcaagaaacaatctccactcacttttaaacaagagaagttctgtaacagagagtgtgttgagagattcttgaaggtgaaaggagataatgtgaaaaaagcagcgaaacaactcagttcatgtctttcttggagacaaaatttcgatattgagcgattgggagcagaggagttctcgacggaacttagcgacggtgtagcttacatctccggccacgacagagaatcaagacccgttattattttccgttttaagcatgattatcagaagctgcatacccaaaaacaatttacgcgtttggtagcgttcacgattgagactgcgatttcaagcatgtccagaaacacggaacagagctttgttcttctctttgatgcaagctttttcagatcatcctctgcatttgcgaatttgcttttggcgaccctaaaaatcatcgcagataattacccatgccgactttacaaagcctttatcatcgaccctccctcttttttctcttacctttggaagggtgttcgtccttttgtggagctctcaacggccacgatgatactgtcgtctctagactacgacgaaccgctagatatcacccacgtgtcatcaaatcctcgatcaacatctttaagattcgacgcatcgtcgattaaatcaacggcctcgattggttcagcttcttcaagattcgctttcacagtctctcagaactcgttgaagccgtggtatctttccttcaccgacacgtcaccttataaccccgccgtctcatcctccgccgctgctcctgtttctcctctcagtgcacggtcgttacccttcgcgtctccggcggtgcgtggtttcaaagacgcgaaaccagccgcatgcagaaagagtctgtttccatcgacgccgttgccggagaagacaaagacggtttcgtatcggaaaactccacgtccttcgttctttcagtcgccggcgatgttctttcgtcgggagaacaatgtcggtggaggaggcgagaagtcacgtgaagcgtttgtaccgtatctgaagttttaccggagaccgtacgatgagactgcgtataggtctaagttacgtggtccacgtggatttctgtcggtcgtgtcttctcacagaagatctcgccacgtgtctttatctcaacggttctga

SEQ ID NO: 7547 - protein, 400 aa, Arabidopsis thaliana
MGKKDEKVEAVLRLVKKQSPLTFKQEKFCNRECVERFLKVKGDNVKKAAKQLSSCLSWRQNFDIERLGAEEFSTELSDGVAYISGHDRESRPVIIFRFKHDYQKLHTQKQFTRLVAFTIETAISSMSRNTEQSFVLLFDASFFRSSSAFANLLLATLKIIADNYPCRLYKAFIIDPPSFFSYLWKGVRPFVELSTATMILSSLDYDEPLDITHVSSNPRSTSLRFDASSIKSTASIGSASSRFAFTVSQNSLKPWYLSFTDTSPYNPAVSSSAAAPVSPLSARSLPFASPAVRGFKDAKPAACRKSLFPSTPLPEKTKTVSYRKTPRPSFFQSPAMFFRRENNVGGGGEKSREAFVPYLKFYRRPYDETAYRSKLRGPRGFLSVVSSHRRSRHVSLSQRF

SEQ ID NO: 7548 - DNA, 1230 bp, Arabidopsis thaliana
  CDS (1)..(1230)
atggatgcttcattgtctccattcgatcaccaaaaaactcaaaacacagagccaaagaaaagcttcattacctcactaatcactctccgttcaaacaacatcaaagaagacacatacttcgtctcagaactcaaacccacggagcaaaaatcacttcaagaactcaaagaaaagctctcagcttcatcctccaaagcttcttcaatgtggggagtctcactcctcggtggagacgacaaagctgacgtaatcctcctcaagttcctcagagcaagagatttcaaagtagcagactctttgagaatgcttgagaagtgtttggagtggagagaagagttcaaagcagagaaattgacagaagaagatctgggttttaaagatttggaaggtaaagttgcttacatgagaggctacgacaaagaaggacacccagtttgttacaatgcttatggtgtgtttaaagagaaagagatgtatgagagagtgtttggtgatgaagagaagcttaacaagtttctgagatggagagttcaggttttggagagaggtgttaaaatgcttcattttaaacctggtggtgttaattccattattcaagttacagatcttaaagatatgcctaagagagagcttagagttgcttctaatcagatcctctctctttttcaagataattaccctgaattggttgctactaagatattcataaacgtgccttggtacttcagtgtgatctactcaatgttcagcccattcctgactcagagaacaaagagcaagtttgtgatgtccaaagaaggcaatgcagcagaaacactctacaagttcattaggccagaagatattccggtgcaatacggtggtcttagccgtcctactgattcgcaaaacggaccgccaaaaccggcgtctgaattctccatcaagggtggtgagaaagttaacattcagattgaaggcattgagggtggagcaaccataacatgggatatagtagttggaggatgggatttagagtacagtgcagagtttgttccaaacgctgaagagagttacgcgatcgttgtcgagaaaccgaagaagatgaaagctacagatgaagctgtttgcaactctttcactacagtagaagctgggaagctcattctctctgttgacaatactctctctcgcaagaagaaagttgctgcttaccgttacactgtccggaaatctactacaaccgtctaa

SEQ ID NO: 7549 - protein, 409 aa, Arabidopsis thaliana
MDASLSPFDHQKTQNTEPKKSFITSLITLRSNNIKEDTYFVSELKPTEQKSLQELKEKLSASSSKASSMWGVSLLGGDDKADVILLKFLRARDFKVADSLRMLEKCLEWREEFKAEKLTEEDLGFKDLEGKVAYMRGYDKEGHPVCYNAYGVFKEKEMYERVFGDEEKLNKFLRWRVQVLERGVKMLHFKPGGVNSIIQVTDLKDMPKRELRVASNQILSLFQDNYPELVATKIFINVPWYFSVIYSMFSPFLTQRTKSKFVMSKEGNAAETLYKFIRPEDIPVQYGGLSRPTDSQNGPPKPASEFSIKGGEKVNIQIEGIEGGATITWDIVVGGWDLEYSAEFVPNAEESYAIVVEKPKKMKATDEAVCNSFTTVEAGKLILSVDNTLSRKKKVAAYRYTVRKSTTTV

SEQ ID NO: 7550 - DNA, 906 bp, Arabidopsis thaliana
  CDS (1)..(906)
atgaacactaatccagtgactaatgggtttgttaaacctgttcctactgaagaagaacaagcaaagattgaggaagtgaggaagctattaggtccattaccggagaagctttcgagtttttgttccgatgatgcagttttaaggtatctaagggcaaggaattggcatgtcaagaaagctactaagatgcttaaagaaactttgaaatggagagttcaatacaaacctgaggagatttgttgggaggaagtagctggtgaagcagagacagggaagatatatagatcgagttgtgtcgataaacttggacgacctgttctcattatgagaccgagtgttgagaattctaaatcggtgaaaggccagattagataccttgtgtattgtatggagaatgcagtacaaaatttgccaccaggggaagaacagatggtgtggatgatagattttcacggttatagtttggcgaatgtatcgttacgaacaacgaaagaaaccgctcatgtattacaagaacattaccctgagagattagcttttgctgttctctacaatcctcctaagttctttgaacctttctggaaggtggcgcggcccttcttagagccgaagacacggaacaaagtgaagtttgtttactcggatgatccaaacactaaggtgataatggaggagaactttgatatggagaaaatggagttagcgtttggtggtaacgatgactcgggttttaacatagagaaacattcagagagaatgaaagaggacgacaagaaaagattggcttcgttggagggcattgtttccgcttctctagactcgctcagcattttatcggtctctgatggtaccgcctctaacagtgctcaccctagctctcatgatgtctctgaggatgagcattaa

SEQ ID NO: 7551 - protein, 301 aa, Arabidopsis thaliana
MNTNPVTNGFVKPVPTEEEQAKIEEVRKLLGPLPEKLSSFCSDDAVLRYLRARNWHVKKATKMLKETLKWRVQYKPEEICWEEVAGEAETGKIYRSSCVDKLGRPVLIMRPSVENSKSVKGQIRYLVYCMENAVQNLPPGEEQMVWMIDFHGYSLANVSLRTTKETAHVLQEHYPERLAFAVLYNPPKFFEPFWKVARPFLEPKTRNKVKFVYSDDPNTKVIMEENFDMEKMELAFGGNDDSGFNIEKHSERMKEDDKKRLASLEGIVSASLDSLSILSVSDGTASNSAHPSSHDVSEDEH

SEQ ID NO: 7552 - DNA, 885 bp, Arabidopsis thaliana
  CDS (1)..(885)
atgttcagaagaaggaatgctcaccaactcgacaatgatgattctcaacaagataacaaggttagagaattgaaatccgcgataggaccattatcgggacatagtttagttttctgctctgatgcttccttgaggagatttctagatgctcgtaattgggatgtggaaaaagccaagaaaatgatccaagagactcttaaatggagatcaacttataaacctcaagagatccgttggaatcaagtagcacatgaaggtgagaccggaaaagcttcaagagctagttttcatgatcgacaaggtagagtagtgcttataatgagaccagccatgcagaactcaacatcacaagaaggtaatatcaggcatttggtgtatcttcttgaaaatgcaatcataaatcttcccaagggacaaaaacaaatgtcttggctcattgatttcactggttggtctatggctgttaatcctcctatgaaaacaacacgcgaaatcattcacattctacagaactattaccctgagagactcggtatcgcctttctctacaatccaccaagactcttccaagcagtctacagggctgctaagtacttcttggacccacgtacagctgaaaaggtgaaatttgtgtacccaaaagacaaagcaagtgatgaactgatgacgacacattttgacgttgagaatctccccaaggaattcggaggtgaagcaacactagagtatgatcatgaagatttctcacgacaaatgtatgaagacgatctcaaaaccgcaaaatactggggactagaggggaagcactatccgaaaacaaacggtttctctccatccgatgttgttcctgagccggcgatagaaatcgcatcagcagctagctga

SEQ ID NO: 7553 - protein, 294 aa, Arabidopsis thaliana
MFRRRNAHQLDNDDSQQDNKVRELKSAIGPLSGHSLVFCSDASLRRFLDARNWDVEKAKKMIQETLKWRSTYKPQEIRWNQVAHEGETGKASRASFHDRQGRVVLIMRPAMQNSTSQEGNIRHLVYLLENAIINLPKGQKQMSWLIDFTGWSMAVNPPMKTTREIIHILQNYYPERLGIAFLYNPPRLFQAVYRAAKYFLDPRTAEKVKFVYPKDKASDELMTTHFDVENLPKEFGGEATLEYDHEDFSRQMYEDDLKTAKYWGLEGKHYPKTNGFSPSDVVPEPAIEIASAAS

SEQ ID NO: 7554 - DNA, 2595 bp, Arabidopsis thaliana
  CDS (1)..(2595)
atgaacattcttggtttcacggtgaacttcttgatccgatgcaaagtcttacccagaagaagcaatacgagttctctctcccgaaacatctccgtactcgccagttatgatcaggaggaagtatcaccgggacgatatagcaatgagttttcgaatcgtaacttggtgcacgaaattttacagctttgtgctagaaacggagctgttatggaagcaaaagcttgccatgggaagattattcgtattgatttggagggagatgttactctgttgaatgttcttattaatgcttattccaagtgtggttttgtggagcttgcccgccaagtgtttgatggaatgcttgagagaagcttggtttcttggaacaccatgattggtttgtatacacggaatagaatggagtcagaagcattggatattttcttggagatgcgaaacgaagggtttaagtttagtgaattcactatatcgagtgttctttctgcttgtggggtaaattgtgatgccttggaatgcaaaaaattgcattgtttgtcagtgaagacatgtattgacttgaacttgtatgttggtactgctttgcttgatctttacgcaaaatgtgggatgatcaaggatgcagtgcaggttttcgagtctatgcaggacaagagttcagttacatggagttctatggtggcaggttatgttcagaacaagaattatgaagaggcactccttctttaccgtcgagctcagagaatgagtttagagcagaatcagttcacattatcttcagtaatttgcgcttgttcaaatctggcagctttaatagaagggaaacagatgcatgctgttatatgtaagtccgggtttggttctaatgtctttgtggcatcctctgcagtagatatgtatgctaaatgtggaagcttgagagagtcttatattattttctcggaagtgcaagagaagaatcttgagctttggaacacgatcatctcggggtttgcaaagcatgctcgtcctaaggaagtgatgatcttgtttgagaaaatgcaacaagatggaatgcacccaaatgaggttacttttagttccttgttatcggtttgtggtcacacgggtttggtcgaggaaggaaggagatttttcaaactcatgagaaccacttacggtctgtcgcctaatgtggttcattactcatgtatggttgatattcttggtcgtgctggtctattgtctgaagcgtacgagttgataaagtctattcctttcgatcctacagcttccatttggggttctcttctagcttcttgtcgagtctacaaaaatctcgagctggcagaagttgcagccgagaaactattcgaattagaaccagaaaacgccggtaatcacgtcttactatccaatatatacgcggcaaacaaacagtgggaggaaatcgccaagtcaaggaagcttttaagggactgcgacgtgaagaaagtaagaggaaaaagttggattgacattaaagacaaggtccatactttcagtgttggagagagcggtcatccgagaatccgtgagatctgttcgacgctagacaatctagtaatcaaattcagaaagtttggatataaaccaagcgtagaacacgagctgcacgatgtggagataggaaagaaagaggagcttttgatgcagcatagtgagaagctggcattggtttttgggttaatgtgtttaccagagagttctccagtgaggattatgaagaatctgaggatttgtgtggattgccatgagttcatgaaggctgcatcaatggctacaagaagatttatcattgttagagatgttaataggcaaaacgaagagcataacaaagcagctctcagagaggcaaagatcaaagagcttaaggctctcataggtcagctttctggaaggagttcactgtattgttcagatgcatgtctgaagagatatctggaagcgaggaattggaacgtaggcaaagccaagaagatgttcgaggagacgctgaaatggagatcgagtgaaggtgaggctggtaaagtttacaaagctggattccatgacaggcatggaagaacgaacacaaaatcattgtatctcattgcgaatgctattctgaatctgccagaggatcaagaacagatgtcttggcttattgacttcacgggttggtcaatgagcactagtgtgcctattaaatctgccagagaaactattaacatactgcaaaatcactaccctgagagactagctgtagctttcctctataatcctccaagactctttgaggcattctggaaggaacatgcaaagacattcgtcaaggtgaagtttgtttacccaaagaaccaggaaagcgtggagcttatgagcacatttttcgacgaggaaaatctcccaaccgaatttggagggaaagctttgttgcaatataactatgaagagttctctaagcaaatgaaccaagacgatgttaaaactgcaaacttttggggattgtgtaacagtaacaataaccagctgcacgcgagcaacgggttttctggagctgagattgcccctgagccagtccaaacacacccttga

SEQ ID NO: 7555 - protein, 864 aa, Arabidopsis thaliana
MNILGFTVNFLIRCKVLPRRSNTSSLSRNISVLASYDQEEVSPGRYSNEFSNRNLVHEILQLCARNGAVMEAKACHGKIIRIDLEGDVTLLNVLINAYSKCGFVELARQVFDGMLERSLVSWNTMIGLYTRNRMESEALDIFLEMRNEGFKFSEFTISSVLSACGVNCDALECKKLHCLSVKTCIDLNLYVGTALLDLYAKCGMIKDAVQVFESMQDKSSVTWSSMVAGYVQNKNYEEALLLYRRAQRMSLEQNQFTLSSVICACSNLAALIEGKQMHAVICKSGFGSNVFVASSAVDMYAKCGSLRESYIIFSEVQEKNLELWNTIISGFAKHARPKEVMILFEKMQQDGMHPNEVTFSSLLSVCGHTGLVEEGRRFFKLMRTTYGLSPNVVHYSCMVDILGRAGLLSEAYELIKSIPFDPTASIWGSLLASCRVYKNLELAEVAAEKLFELEPENAGNHVLLSNIYAANKQWEEIAKSRKLLRDCDVKKVRGKSWIDIKDKVHTFSVGESGHPRIREICSTLDNLVIKFRKFGYKPSVEHELHDVEIGKKEELLMQHSEKLALVFGLMCLPESSPVRIMKNLRICVDCHEFMKAASMATRRFIIVRDVNRQNEEHNKAALREAKIKELKALIGQLSGRSSLYCSDACLKRYLEARNWNVGKAKKMFEETLKWRSSEGEAGKVYKAGFHDRHGRTNTKSLYLIANAILNLPEDQEQMSWLIDFTGWSMSTSVPIKSARETINILQNHYPERLAVAFLYNPPRLFEAFWKEHAKTFVKVKFVYPKNQESVELMSTFFDEENLPTEFGGKALLQYNYEEFSKQMNQDDVKTANFWGLCNSNNNQLHASNGFSGAEIAPEPVQTHP

SEQ ID NO: 7556 - DNA, 1623 bp, Arabidopsis thaliana
  CDS (1)..(1623)
atgactgctgaagttaaggttgaggagaaacaggtggagtcagaggttgttattgctcctgctgttgttcctgaggagactactgttaaggctgttgtggaagagactaaggttgaagaagatgagagcaagcctgagggtgtggagaagagtgcttccttcaaagaagagagtgatttctttgctgatttgaaagaatctgagaaaaaggcactgagtgatctcaagtctaagcttgaggaagctattgttgacaacactctcttaaagacgaagaagaaggagagctctcctatgaaggagaagaaggaagaggttgtgaaacctgaagctgaggttgagaagaagaaggaagaagcagcagaggagaaggttgaagaagagaagaaatctgaggctgttgttaccgaagaagcaccgaaagctgagactgttgaggctgttgttacagaggagataatccccaaggaagaagtgactactgttgttgagaaggtagaagaagaaaccaaggaagaagagaagaaaaccgaggatgttgttactgaagaagtgaaagctgagactattgaggtggaggatgaagatgagtcggtggataaggatatcgagctttggggagtgccattgcttccaagcaaaggagctgaaagcacggatgttatcctcttgaagttcttgagagcaagagactttaaagtcaacgaagcctttgagatgctgaagaaaaccctcaaatggagaaagcaaaacaagattgattcgatccttggagaggagtttggggaggatcttgccactgcagcttacatgaacggtgtggaccgcgagtcccacccagtttgttacaatgtccacagcgaggagctttaccagacgattgggtcggagaagaacagagagaagttcttgagatggaggtttcagctgatggagaagggaatccagaagcttaatcttaaaccaggaggtgttacttctcttctccagatccacgatctcaaaaacgctcctggagtgtcaagaacagagatttgggtcggaatcaagaaagtaatcgagactttgcaggacaactatccggaattcgtgtccagaaacatattcatcaacgttccattctggttctacgccatgagagctgtcctctcgccattcttaactcaacgaaccaagagcaagtttgttgtggctcgtcccgctaaggtcagagagactcttctcaagtacattccagctgatgagctcccagttcagtacggtgggttcaaaacagtagacgataccgaattctccaacgaaactgtctctgaagttgttgttaagcctggatcatctgaaaccatcgaaatcccagctcctgagactgaaggtacattggtatgggacatagcggttttgggatgggaagtgaattacaaggaagagtttgtgccaacagaagaaggagcttacacggtaatagtccaaaaggtgaagaagatgggagcaaatgaaggaccaatcaggaacagtttcaagaacagtcaggctggtaagattgttcttaccgttgacaatgtctctggcaagaagaagaaagttctgtacaggtacagaaccaagactgaatcctcttcctga

SEQ ID NO: 7557 - protein, 540 aa, Arabidopsis thaliana
MTAEVKVEEKQVESEVVIAPAVVPEETTVKAVVEETKVEEDESKPEGVEKSASFKEESDFFADLKESEKKALSDLKSKLEEAIVDNTLLKTKKKESSPMKEKKEEVVKPEAEVEKKKEEAAEEKVEEEKKSEAVVTEEAPKAETVEAVVTEEIIPKEEVTTVVEKVEEETKEEEKKTEDVVTEEVKAETIEVEDEDESVDKDIELWGVPLLPSKGAESTDVILLKFLRARDFKVNEAFEMLKKTLKWRKQNKIDSILGEEFGEDLATAAYMNGVDRESHPVCYNVHSEELYQTIGSEKNREKFLRWRFQLMEKGIQKLNLKPGGVTSLLQIHDLKNAPGVSRTEIWVGIKKVIETLQDNYPEFVSRNIFINVPFWFYAMRAVLSPFLTQRTKSKFVVARPAKVRETLLKYIPADELPVQYGGFKTVDDTEFSNETVSEVVVKPGSSETIEIPAPETEGTLVWDIAVLGWEVNYKEEFVPTEEGAYTVIVQKVKKMGANEGPIRNSFKNSQAGKIVLTVDNVSGKKKKVLYRYRTKTESSS

SEQ ID NO: 7558 - DNA, 1167 bp, Schizosaccharomyces pombe 972h-
  CDS (1)..(1167)
atgttttcgcgactttgggtgagatgtagatgttctacagcgctttcggcagcagcagcaggaacatttttcttccgacgttctcaaaaacagcctgagcctgagactgtagacgaaaaagtgagctttgaaagttattcacctttaaagttgatgattcaaaagacatggcctaggtttcaagagcataaagaatatcgcgaatcgttcatacgattagcaaaatgcgactcacccgacgctatcttagtacgatttttggcttcttgcaataacgattcacatgaagcaagtcaaaagttaatcaatacgctacaatggcgcgtagatacaggtgttgagcgtatcgttgagcggggtgagctttatgccaaagagacaaatgatgatcagttcttggaacaattgagaactggaaaggtaactatgttgggaagggacttatctgatcgccctatctgctatattcaagtccatttacatcaaccctcaaaattgactcagaattctcttcgtgagatgaccgtgtgggtaatggaaactatgcgactttttctgcgaccacaaaagactttgaaggactctatggactctcctcaaaatgtgaatgttctgttcgaccttagtaacttttctctacataatatggattattctttcgttaagtatttggcatcgtgtttggagtattattacccacaatctcttggtgtttgtattcttcataaatctccttggattttcagaagtgtttggaacattattaagggatggattaaaccagagattgctgcgaaaattgtttttactcagagcgcaaacgacctcgaaaaatacatagactattcggtaattcctacttctttaggaggaggcaacaaaaagatattccaatacatagagccagtagagcatgagaatgatgcagtcatcgaagatagcgctgaaaagactgcagcacttgctcgctattatgcgtatttcagtgaatgggagcagcactctttaaattgggccaagctagatgatgatgatgctcaaaatgaaaaagtccgcttatgctgcgatgctgcaggtaccaactttgccaactgctattggaatgttgacaaatatatacgagcgagaaccgtttacgaccgactgaaatggattggtaatgtttaa

SEQ ID NO: 7559 - protein, 388 aa, Schizosaccharomyces pombe 972h-
MFSRLWVRCRCSTALSAAAAGTFFFRRSQKQPEPETVDEKVSFESYSPLKLMIQKTWPRFQEHKEYRESFIRLAKCDSPDAILVRFLASCNNDSHEASQKLINTLQWRVDTGVERIVERGELYAKETNDDQFLEQLRTGKVTMLGRDLSDRPICYIQVHLHQPSKLTQNSLREMTVWVMETMRLFLRPQKTLKDSMDSPQNVNVLFDLSNFSLHNMDYSFVKYLASCLEYYYPQSLGVCILHKSPWIFRSVWNIIKGWIKPEIAAKIVFTQSANDLEKYIDYSVIPTSLGGGNKKIFQYIEPVEHENDAVIEDSAEKTAALARYYAYFSEWEQHSLNWAKLDDDDAQNEKVRLCCDAAGTNFANCYWNVDKYIRARTVYDRLKWIGNV

SEQ ID NO: 7560 - DNA, 726 bp, Drosophila melanogaster
  CDS (1)..(726)
atgccttccgatcaggatccgactccagagcagataagccaagtcaagactagcattctgcagagattggagaaagagccgccagcagaaccattccatcccaacgatctaaagcgaattacggacagtgacctttggatcaccaagctactgcaggtctatgacttcgatgtggagaagtgcatcacgaggttgtgggataacctcgcgtggcggaagagctttggagtttacgacatcaccgaggcaaaccttaatcaggagtttctaaacgatggctccatctatgtgcacaacaaggatagggacggaaaaccgctgctgatcctcaccatcaagaaacactcgaagagccgcaatcaggaggatctactgcgcatccttgtcttctggattgagcgtttgcagcgggatagtaacctggacaagattaccattttcatggacatgactggcgccggtctgagtaacttggacatgggcttcatcaagagcatcatcggagtgttcgagaccaagtatccgtatgtgcctaactatattctggtacatgatttgccttttctgctagatgctgcctttaaattggtgaagaccttcctgccccccgaagcgctgaagatccttaaggtgaccaccaaaaaggacatcgatcagtatgtggacaaggataactgcctgaaaatctggggcggtaatgatgactacgtttacaaattcgcctaa

SEQ ID NO: 7561 - protein, 241 aa, Drosophila melanogaster
MPSDQDPTPEQISQVKTSILQRLEKEPPAEPFHPNDLKRITDSDLWITKLLQVYDFDVEKCITRLWDNLAWRKSFGVYDITEANLNQEFLNDGSIYVHNKDRDGKPLLILTIKKHSKSRNQEDLLRILVFWIERLQRDSNLDKITIFMDMTGAGLSNLDMGFIKSIIGVFETKYPYVPNYILVHDLPFLLDAAFKLVKTFLPPEALKILKVTTKKDIDQYVDKDNCLKIWGGNDDYVYKFA

SEQ ID NO: 7562 - DNA, 957 bp, Oryza sativa (japonica cultivar-group)
  CDS (1)..(957)
atgtcctttctattcaagtcaagcaatggtgctacaacagagaaaaacttgaccctagaagagcagcaggagaagataaatgacttgcgtaaggagcttggtgaacactcatcagaagaaatacaagatttcctttcagatgcctcgtgcctgagatttcttcgagcaagaaactggaacgtgcagaaagcaagtaaaatgatgaagtcagctgtaaagtggcgggtgtcatatatgccacaaaagattaactgggatgatgttgcacatgaagcagagacaggaaagatatatagggctgactacaaggacaaacatggaagaactgttcttgtcctgaggccaggcttagagaacactacttcaggaaagggacagatcaaatatcttgtttactgtctggagaaagcaattatgagcctgacggaagatcaagagaagatggtctggctgacagacttccagagttggacattggggagcacaccgctgaaagtgacccgagagactgtgaacgtcttgcaagactgttaccctgagaggcttgggttagcaatcctttacaatcctcctaggatatttgagtccttctggaagatagtgaagccatttttggaccatgagacctacaagaaggtgaaatttgtgtactccagcgataaagagagccagaagataatggctgacgtctttgacttggacaagctcgactcagcattcggaggaaggaatccagctaccttcgaatacaatagctatgctgagcgtatgagagccgatgacattaagatgggttcttcattcaaatcaaacggcatcaccctgcctcaggaccattcacatgtatccgctgacaaggaggctaatggtggcggttcggacgcctcaagtgaggcctccttctatagtggaactgattccccgaatcacgaagagggaggtagcatactggcttga

SEQ ID NO: 7563 - protein, 318 aa, Oryza sativa (japonica cultivar-group)
MSFLFKSSNGATTEKNLTLEEQQEKINDLRKELGEHSSEEIQDFLSDASCLRFLRARNWNVQKASKMMKSAVKWRVSYMPQKINWDDVAHEAETGKIYRADYKDKHGRTVLVLRPGLENTTSGKGQIKYLVYCLEKAIMSLTEDQEKMVWLTDFQSWTLGSTPLKVTRETVNVLQDCYPERLGLAILYNPPRIFESFWKIVKPFLDHETYKKVKFVYSSDKESQKIMADVFDLDKLDSAFGGRNPATFEYNSYAERMRADDIKMGSSFKSNGITLPQDHSHVSADKEANGGGSDASSEASFYSGTDSPNHEEGGSILA

SEQ ID NO: 7564 - DNA, 750 bp, Arabidopsis thaliana
  CDS (1)..(750)
atgcttaaagaaacactaaaatggagggctcaatacaaacctgaggagattcgatgggaggagatagcacgagaagctgagaccggaaaaatataccgagctaattgtaccgataagtatggaagaacagttcttgttatgagaccaagttgccagaatacaaaatcatataaagggcagattagaatcttggtgtactgtatggaaaatgcaatcttgaacctaccagataaccaagagcaaatggtttggctaatcgattttcacggtttcaacatgtctcatatctccttgaaagtgtctcgagaaaccgctcatgtgttacaagaacattaccctgaacgcttaggcttggccattgtatacaacccgcctaagatttttgagtcgttttataagatggtgaaaccatttttagagccaaagaccagcaacaaggtgaaatttgtctactcagatgataacctcagcaacaagcttctggaggatcttttcgatatggagcaactcgaggttgcatttggtggaaaaaacagcgatgcgggtttcaattttgagaaatatgctgagagaatgagagaggatgatttgaagttctatggaaacaccacagtgtcatcaacctcagctcatttgactaactcagattctgaagtttcagactctgagatgaagtatttggaggacaaagaagatgagactatagagaatggaactttgcaatctcctttagatacaacaaaaacctaa

SEQ ID NO: 7565 - protein, 249 aa, Arabidopsis thaliana
MLKETLKWRAQYKPEEIRWEEIAREAETGKIYRANCTDKYGRTVLVMRPSCQNTKSYKGQIRILVYCMENAILNLPDNQEQMVWLIDFHGFNMSHISLKVSRETAHVLQEHYPERLGLAIVYNPPKIFESFYKMVKPFLEPKTSNKVKFVYSDDNLSNKLLEDLFDMEQLEVAFGGKNSDAGFNFEKYAERMREDDLKFYGNTTVSSTSAHLTNSDSEVSDSEMKYLEDKEDETIENGTLQSPLDTTKT

SEQ ID NO: 7566 - DNA, 1026 bp, Eremothecium gossypii
  CDS (1)..(1026)
atggtgctgttcaagcgaaccaagacagtgtccgacggtgactgggatgtgaagaacctgattgcggttagaaagcccataatcgagccggcgccgggatgtgtgccgcgcgctgaggagccgctgacagcggaggaagagcaaaaatacaaggaagtgctgcagcacttccagcttccggagctgcaactacctacgactgagaagcacgcgacagaggcgcgggtgctgagcatggaggaaaaggcctggttaacgcgtgagtgcatgattaggtatctgcgggcatcgaagtgggtcgtacgggacgctattaaccgtattacaatgtccatagggtggaggcgcgagtttgggatttcctgcttcggcgaggagaatggcgactcgctactcgctgcaacagtgtcagatgagaacgagactggtaaggaagtggtcctcgggtacgaccgcgaggcgaggccgattctgtacctcaagccgggacggcaaaacacgaagacctcccacaggcaggtccaacacctggttttcatgttggagcgcgtcatagacatgatgccttcgggccagcaccagctggcccttctaatcgacttcagcgaccacgaggatgttcccaaggtctctgggaatagcaaaacaccgccaataagcgttgggaaagaggtgctgcatatattgcagacgcattatccagagagactcggtaaagcgctattgacaaacataccttggcttgcatggacgtttctgaagatgatacacccttttatcgatccgcttacgcgtgaaaagctcgtcttcgaccagccgttcgtgaactttgtgcccgaagagcagctggataaactctacggagggctgcttgacttcacatatgtccatgagcagtactggcctagtcttctgcagcgcactagggagaatcgggcgcattacatggcccgtttccgcgaactagggggtcatattggcttgagcgagtacgccttacgggcgcacggcgacaaatccacctga

SEQ ID NO: 7567 - protein, 341 aa, Eremothecium gossypii
MVLFKRTKTVSDGDWDVKNLIAVRKPIIEPAPGCVPRAEEPLTAEEEQKYKEVLQHFQLPELQLPTTEKHATEARVLSMEEKAWLTRECMIRYLRASKWVVRDAINRITMSIGWRREFGISCFGEENGDSLLAATVSDENETGKEVVLGYDREARPILYLKPGRQNTKTSHRQVQHLVFMLERVIDMMPSGQHQLALLIDFSDHEDVPKVSGNSKTPPISVGKEVLHILQTHYPERLGKALLTNIPWLAWTFLKMIHPFIDPLTREKLVFDQPFVNFVPEEQLDKLYGGLLDFTYVHEQYWPSLLQRTRENRAHYMARFRELGGHIGLSEYALRAHGDKST

SEQ ID NO: 7568 - DNA, 1311 bp, Eremothecium gossypii
  CDS (1)..(1311)
atgacacagacagcggcacccggtagggtgcagacgttgacgaaggagcaggaaaaggtgttgaagcaggtgtgggtgcaccttttccagttctggggaatagacgtggacggctctgcggtgctgacggcgaaggagcccgagccagcggcgcccagcggcaagggtcgcaagctgctggggctctttggcaagcgtaaggacgcaacgggggcggcacggaaagagagcaacggcaaggcagcagccaaggtctacgatgcggagaaagtcgaggacagcgatgcagaaaaggaaaagccaacaccgcagaaggtcgaggggctcgaggagatgtacgagctacttaaggagttggatggcgctgcagtatccaaggagttctggtcaatgctgcgctgcgactacccagacaacctccttctccgttttgttcgtgcgcgcaagtgggacatcaacaaggctatgatcatgatggcccattccttgcgctggcgcttaaatgaggggaagccggaagatatcgtcttcggtggagaacgcggagcgcagaaggcggacaagaagggcattgtgaagcagcttgagctgggcaaggcgaccgtccggggttttgacaaaaacggctgccccatcgtgtatgtgcggccgcgcttacatcatgcggctgaccagacggaggcagagacaagcgagtactcgctttttatcattgagcaggctcgcttgttcctcaaggagccctgcgacacagctacgattttgttcgacctttcgggcttttccatggccaacatggactatgctcctgtgaaatttctgatcacctgctttgaagcacactacccagagtgcctaggcaagctgttcatccacaaggccccatggatcttcccaccgatatggaacattatcaaaaactggctagaccctgtggttgccgcaaaaatcgcattcaccaagacagctgctgacttggaagagttcattcctgctgagcaaatccctctagaacttggtggcaaggacgaatacaactttgatggttttgtgatgccagatggctcggccgacacgaagttatcagacgagaagggcaaggctgccgtcttggaagagagagaggccattataaagcgctttatagatgccacaatctcctggattgagagtacctccgacgaagagtctgccaagtggctcgagaagaagatagacttgagcaaagaactttccgaaaactattctaaattagatccttatatcaggtctagatccttctatgacgtaaacgggacgttgaaagtttag

SEQ ID NO: 7569 - protein, 436 aa, Eremothecium gossypii
MTQTAAPGRVQTLTKEQEKVLKQVWVHLFQFWGIDVDGSAVLTAKEPEPAAPSGKGRKLLGLFGKRKDATGAARKESNGKAAAKVYDAEKVEDSDAEKEKPTPQKVEGLEEMYELLKELDGAAVSKEFWSMLRCDYPDNLLLRFVRARKWDINKAMIMMAHSLRWRLNEGKPEDIVFGGERGAQKADKKGIVKQLELGKATVRGFDKNGCPIVYVRPRLHHAADQTEAETSEYSLFIIEQARLFLKEPCDTATILFDLSGFSMANMDYAPVKFLITCFEAHYPECLGKLFIHKAPWIFPPIWNIIKNWLDPVVAAKIAFTKTAADLEEFIPAEQIPLELGGKDEYNFDGFVMPDGSADTKLSDEKGKAAVLEEREAIIKRFIDATISWIESTSDEESAKWLEKKIDLSKELSENYSKLDPYIRSRSFYDVNGTLKV

SEQ ID NO: 7570 - DNA, 1062 bp, Eremothecium gossypii
  CDS (1)..(1062)
atgggacttttcagcaaacgtagcgaacaggctgctaccaagcctgtcgacctcattccggtgtcgcgcgttattcgtgagccgccagcaaactacccggtcccggaggctattccaaagctgtccactgagcagcatgagaaatatacacatgtattaaagtacttccaggatgaaaagttggtccttccgctcaagtccagcaaaaagcaagaatcggcggaacagactgctgcactctccgcatacgagcggttttggctaacacgggagtgcctcctgcgctatctgcgggctactagctggaatgtggaggctgccattgagcgtctgcgtaagacacttgtgtggaggcgggagtttggcgttacgggcgaccccgatgcgccaaacagtctaaagccggagactgtggaaaaggaaaataccaccgggaagcaggtgttgctggggttcaacccccaacgtctgcccgtttatatgatgaaaaacggtcgccagaacaccgagccatccttcacacaagtccagcatctggtattcttcatggaagcggccattgcgatgatgccccagggcgtcgagctactagcgctactcatagactttagacattacaaggagccgggtgtgatcggcgcaaagtcgccaccaatctcccttgccaagcaaatcctcagcatcatccaggaccattatcctgaacgcctgggcaaagcgctcttctttgatatgccatggtacggctggacttttctaaaactcatgcatccattcatcgacccggtcacaaggtcaaaactggtatatgacgagccaatctccagttacatagacgccgaacaattggaggcaacctatggggggaaattggacttccagtacaaccacgaggagtattggcccgattttgtctccgttttcgaggagcgcaaagattaccaatacgcccgctttttgaaattcggagctgttatcggcttgagcgagtttgaccttaagggcaaggaggcggaattacgttatcccgccgattaccaggagccatccactgaggggtag

SEQ ID NO: 7571 - protein, 353 aa, Eremothecium gossypii
MGLFSKRSEQAATKPVDLIPVSRVIREPPANYPVPEAIPKLSTEQHEKYTHVLKYFQDEKLVLPLKSSKKQESAEQTAALSAYERFWLTRECLLRYLRATSWNVEAAIERLRKTLVWRREFGVTGDPDAPNSLKPETVEKENTTGKQVLLGFNPQRLPVYMMKNGRQNTEPSFTQVQHLVFFMEAAIAMMPQGVELLALLIDFRHYKEPGVIGAKSPPISLAKQILSIIQDHYPERLGKALFFDMPWYGWTFLKLMHPFIDPVTRSKLVYDEPISSYIDAEQLEATYGGKLDFQYNHEEYWPDFVSVFEERKDYQYARFLKFGAVIGLSEFDLKGKEAELRYPADYQEPSTEG

SEQ ID NO: 7572 - DNA, 1230 bp, Neurospora crassa
  CDS (1)..(1230)
atggccactgtcctcaaggtccctctggcttcccctacccctgacagccagcccaagccccaagcggcgcttacggctgaccaggaggaaaagtacaactggttgctcgaacaagtcaaaaactggaaggaagtccctgcgactgagggcaaggccggtcccatcaccgatagagagaagttctggttgactcgggaatgtctcctccgctttctgcgcgcaacaaaatggaatcaaaaggaggctgagaaacgcatcctgggcacgctcacgtggaggagagagtacggcgtcgaggagttgactgcggatcacatctcgcccgaaaacgagaccggcaagcagatcatcttgggctacgacaaggagggccgcgtctgccattacctgaaccctggccgccagaacaccgaggcctctcctcgccaagttcagcacctcgtcttcatgctcgagcgcgttatcgaccttatgccgccccaggttgagactctgtctctgctcatcaacttcaagtcgagcaagtccaggtccaacacggctcctggcatcggtcaggctcgcgaagtcctcaacatccttcagaaccactaccccgagagactcgggcgcgctctcattattaatgttccctggattgtcaacggcttcttcaaactcatcactccctttatcgaccccaacacccgcgagaagctcaagttcaacgaggacatgaagaagtacgtccccgccgagcagctctggaccgagttcaacggctctcttgagttcgactacgaccatgccacctactggcccgccctgcagaagatgtgcgtcgagaagcgggaggccaagtaccagcgctgggttgccggtggtcagcagattggcgagctggaggatttcatcactgggcatgctcaggttggcgttgctggtcctattgccgctgccacctctgctcctgagcccactcctgccgcatctgcgcctgcgccggctgctgagcccgagaccattcttgctcccgagcctgctcttgcttccgagactgctcttgctcctccccctgttactgcttccgtaccagtggcaacggaggctcacgacgaggcgccagccccggctcccgaggctgctgctattccagagcccacaccggcggcggtgcctgtggaggagaagaaggaagaggaaaagccaaaggttgtcgcgtcaactgaggtcggagagaccactgcttaa

SEQ ID NO: 7573 - protein, 409 aa, Neurospora crassa
MATVLKVPLASPTPDSQPKPQAALTADQEEKYNWLLEQVKNWKEVPATEGKAGPITDREKFWLTRECLLRFLRATKWNQKEAEKRILGTLTWRREYGVEELTADHISPENETGKQIILGYDKEGRVCHYLNPGRQNTEASPRQVQHLVFMLERVIDLMPPQVETLSLLINFKSSKSRSNTAPGIGQAREVLNILQNHYPERLGRALIINVPWIVNGFFKLITPFIDPNTREKLKFNEDMKKYVPAEQLWTEFNGSLEFDYDHATYWPALQKMCVEKREAKYQRWVAGGQQIGELEDFITGHAQVGVAGPIAAATSAPEPTPAASAPAPAAEPETILAPEPALASETALAPPPVTASVPVATEAHDEAPAPAPEAAAIPEPTPAAVPVEEKKEEEKPKVVASTEVGETTA

SEQ ID NO: 7574 - DNA, 1212 bp, Magnaporthe grisea 70-15
  CDS (1)..(1212)
atgacaaccgctacatctaacggatccgcccaggacaaggcggcggtgggcattctgaaaacgccgatttctgctcccctcgaaggatgtacacctcccgcgaaggaccctctgaccaaggagcaagaaatcaagtacgattggctcttggagcaagtcaagaaatggactgaagttccttcaaccaagggcaaaggcggtcctctcacggatgctgagcgcatgtggttgacccgagagtgcttgctgcggtatctccgcgcaacaaagtgggttgagaaggatgcggaaaagcgccttagggagacattgacgtggcggagggattttgacgttgccgacctgacttgggatcacatttcgcccgagcaagagacaggcaagcaggtaattcttggcttcgacaaggaggggagggtgtgccattacctctgccccggccggcaaaacacgcaaccgtctcaccgccaagttgagcatctggtctttatgcttgaaagagtcctggatcttctccctgcgcagcgtgagaagttggtgctgctcatcaacttcaaacagggcaagaaccgctcctacacggccccgggcattggacaagcccgcgaagtcctcaacatcctgcaaacgcactacccggagagacttggacgcgccctcattgtgaatgtcccatgggttgtgcagggcttcttcaagctcatcaccccattcatcgaccctctgacccgtgacaagctcaagttcaatgaggacatgagcaactacgtccccaaggagcaactttggacagagatcagcggcggtgcacttgagtttgaatatgatcactccacttattggcctgctcttcgcaagatgtgcgaagagcgtcaggttgagaaggagaagagatggacagccggtggcaagcagattggagagcttgaggactacctcggagggaaagcgagccaaggcattacgccacctgttgctgcaactaccgaagtcgctgccactgccactgccacctctactgcacccgttgccgcacccgccgcaaccgctgctgcatccgaggttgctcctatcgcggttgcccaagagagcgctgcaccagagaagccggcagtcgaaggagccaagaaggaggagtctggtgcggtatcagagaagcaaggtgacaaggttgaggatttgaaggtagacgagctgaaggtcgccgaatag

SEQ ID NO: 7575 - protein, 403 aa, Magnaporthe grisea 70-15
MTTATSNGSAQDKAAVGILKTPISAPLEGCTPPAKDPLTKEQEIKYDWLLEQVKKWTEVPSTKGKGGPLTDAERMWLTRECLLRYLRATKWVEKDAEKRLRETLTWRRDFDVADLTWDHISPEQETGKQVILGFDKEGRVCHYLCPGRQNTQPSHRQVEHLVFMLERVLDLLPAQREKLVLLINFKQGKNRSYTAPGIGQAREVLNILQTHYPERLGRALIVNVPWVVQGFFKLITPFIDPLTRDKLKFNEDMSNYVPKEQLWTEISGGALEFEYDHSTYWPALRKMCEERQVEKEKRWTAGGKQIGELEDYLGGKASQGITPPVAATTEVAATATATSTAPVAAPAATAAASEVAPIAVAQESAAPEKPAVEGAKKEESGAVSEKQGDKVEDLKVDELKVAE

SEQ ID NO: 7576 - DNA, 1053 bp, Gibberella zeae PH-1
  CDS (1)..(1053)
atggcaagctcagcagagaccacttctggtccccgaaagacaccaatccctaccccagggcccaacagtcagcctacaccaaggccagagctgaccgaggagcaaaagacaaagtatgaggctctgctagagcaggtcaagggcttcaccgagattgaatgcgagaagcaggccgacaaggaggacaagtcaggccccatcacggatcatgagcgctcatggcttactcgggagtgtctccttcgttatcttcgtgccacaaagtggactgtcgatgagtcggccaagcggctcaaggcgaccctcgcatggcgtcgcgagtacggtctggagggcttcacacccgagtacatttctcccgagcaggagacaggcaagcagatgattgtgggctttgatcgtcagggtagaccgtgtcaatacctgaacccggctaggcaaaacaccgacacgactccccgtcagcttcaccacctgttttacatggtggagcgagtgacggatcttatgccaccgggcgtggagatgcttagtctgatgatcaatttcaagcctagcaaggagcgcaagaacacgagtgtacccgtgtctgtggccagagaggtgttgcatattctgcagaaccactaccctgagaggctgggcaaggctctcatcatcaacgtaccttggattgtctggggattctttaagatcatcactccgttcatcgaccccgtgacacgcgagaagctcaaattcaatgaggacatgaagcagtatgttcccccggagcagctgtggagcctcgactggggcggtgatatggactttgagtatgaccacgagacatactggcctgcgctcaacgagatgtgccgccagaagcgtgaggacaagttccgtcggtgggaggccggtggtaaggagattggtgagagtgaggattacctcgccggtggaacagacgtgagcatcaagggtgtcaaatttgagggtgccaaggatggtgtcaaggaggttgaggagaagttggcggcgaccaagttggaggagcagcctgttgcggcttga

SEQ ID NO: 7577 - protein, 350 aa, Gibberella zeae PH-1
MASSAETTSGPRKTPIPTPGPNSQPTPRPELTEEQKTKYEALLEQVKGFTEIECEKQADKEDKSGPITDHERSWLTRECLLRYLRATKWTVDESAKRLKATLAWRREYGLEGFTPEYISPEQETGKQMIVGFDRQGRPCQYLNPARQNTDTTPRQLHHLFYMVERVTDLMPPGVEMLSLMINFKPSKERKNTSVPVSVAREVLHILQNHYPERLGKALIINVPWIVWGFFKIITPFIDPVTREKLKFNEDMKQYVPPEQLWSLDWGGDMDFEYDHETYWPALNEMCRQKREDKFRRWEAGGKEIGESEDYLAGGTDVSIKGVKFEGAKDGVKEVEEKLAATKLEEQPVAA

SEQ ID NO: 7578 - DNA, 1245 bp, Aspergillus nidulans FGSC A4
  CDS (1)..(1245)
atgtccaccactccatcagacgccccgaccccaactccagctacctcacagccggcgcctccggttgacggcaataccgtcgcgcctgatgttgagaagctccacgtctctccggagggcgagtctacacctacccctgcgcctgcctctgagtccgcatccgcacctccaaaagaatccctagttcaagaagagccggccgcaactcctgctccccagcaggagatagagacaattgacagtctgaacctcccctcctccgctgccgatggcctcatccaaaaacccttcgtccgccccgttaacacagcaaagccacctccgcccgccaaattgacaccagaacaacaagccaagtatgagagcgtgcttaaatccgtttctggatggacaactgtcccaaccacagccgcgaagaatgccccaactgcaccgataacagacgatgagcgcatgttccttacacgtgaatgtctcctccgttacctgcgcgccacgaaatggaacgcccccgaagctgtggctcggctgcagcgcacacttacctggcgccgggagtacggcattgagaaattgacagcggattatatctccattgagaacgagacaggaaaacaggtcctgctcggatatgatattcacggccggccgtgcctgtatttgctgccgtcgaaccagaatacggagaagagcgatcgccaagtgcagcatctggtattcatgcttgagcgtgcgattgaacttatgccggcggaccaggaaacgctcgcgttaatcgtggattatagccagaccaagtccggacaaaatgctagcattggacaggcgaaggatacagtgcactttttgcagaaccactatccggagaggttggggcgggcgctggttattaacatgccatttatcataatgggcttctttaaaatcatcacccctttcctcgaccccgttacccgcgagaaactcaagttcaacgagaatctaaccaaccacgtcccaccatcccagctcatgaagtccgtgggcggtgacgtcgagttcaagtacgaccacgcggcatattggcctgctctaaacaaacttaccgagctaaagcagaaggagtaccgcgagcgatggattaagggcggaaagcggatcggcgagtatgagcactaccttaagactggtgctagtcctagcatatctcagcgggaagccgaagcgaacggcagcgctggtcccgcggccgacaaggcttcgtga

SEQ ID NO: 7579 - protein, 414 aa, Aspergillus nidulans FGSC A4
MSTTPSDAPTPTPATSQPAPPVDGNTVAPDVEKLHVSPEGESTPTPAPASESASAPPKESLVQEEPAATPAPQQEIETIDSLNLPSSAADGLIQKPFVRPVNTAKPPPPAKLTPEQQAKYESVLKSVSGWTTVPTTAAKNAPTAPITDDERMFLTRECLLRYLRATKWNAPEAVARLQRTLTWRREYGIEKLTADYISIENETGKQVLLGYDIHGRPCLYLLPSNQNTEKSDRQVQHLVFMLERAIELMPADQETLALIVDYSQTKSGQNASIGQAKDTVHFLQNHYPERLGRALVINMPFIIMGFFKIITPFLDPVTREKLKFNENLTNHVPPSQLMKSVGGDVEFKYDHAAYWPALNKLTELKQKEYRERWIKGGKRIGEYEHYLKTGASPSISQREAEANGSAGPAADKAS

SEQ ID NO: 7580 - DNA, 1035 bp, Candida glabrata CBS138
  CDS (1)..(1035)
atgtttaagaagcttacaggtaagaaagaggtcaagaaagttgatgaatcgaagcttatatccatagataagccaatcaagtctcttccagaagagattaagagaccggaagaagagaagttgactgctgaacaacaagcgaagtacgatgaagtctacaagtacctcacaaatgctgaattgaaagttggtaataaagaaaaaaatccaactgaatcctcgggtttaatcgatgaagaaagagcatggctaaccagagagtgtataatacgttacttaaaggctactaagtggcatgttaaggatgccattgacagaatcctaggatcattggcctggagacgtgaatttggaattaaccatttgggtgaagaaaatggtgacgaggttacatcggatttggttgctgtagagaatgaaagtggtaaacaagttgttctagggtatgaaaataatgctagacctattttatacttgaaaccgggtagacaaaataccaaaacctcgcatagacaagttcaacatctagtttttatgttggaaagagtaattgatttcatgcctattggtcaaggatctctagctttattaattgattttaaagagtatagtgatgtaccaaaggtgccggctaacagtaaaattcctccaattggtgtagggaaagaggttttgcatattctacaaacacattatccagaaagacttggaaaagctttgctgacaaacattccttggttagcttggacatttttgaaacttatccatccattcattgacccaatgaccagagaaaagttagtctttgatgaacctttcacaaaatatgttcctatggatcaactagatgccatttatggtggtcatttgaacttcaaatacaaacatgaagtatattggcctgctttgattgaatattcaaaagaaaagagagaacattacatgaagagattccagaaatttggtagtaagattggtttgagtgagtacgacttgagaggaactcatgaaacaccactgtatcctgtcaactga

SEQ ID NO: 7581 - protein, 344 aa, Candida glabrata CBS138
MFKKLTGKKEVKKVDESKLISIDKPIKSLPEEIKRPEEEKLTAEQQAKYDEVYKYLTNAELKVGNKEKNPTESSGLIDEERAWLTRECIIRYLKATKWHVKDAIDRILGSLAWRREFGINHLGEENGDEVTSDLVAVENESGKQVVLGYENNARPILYLKPGRQNTKTSHRQVQHLVFMLERVIDFMPIGQGSLALLIDFKEYSDVPKVPANSKIPPIGVGKEVLHILQTHYPERLGKALLTNIPWLAWTFLKLIHPFIDPMTREKLVFDEPFTKYVPMDQLDAIYGGHLNFKYKHEVYWPALIEYSKEKREHYMKRFQKFGSKIGLSEYDLRGTHETPLYPVN

SEQ ID NO: 7582 - DNA, 1044 bp, Candida glabrata CBS138
  CDS (1)..(1044)
atgggtattttctcaaggaagaagaaggaagctaccccggttaataggggcgatctaatcccatgtgaaactatgatcgaagcgccacctaagggctctccaccaccaaaaaaacctgctgatcttgatgctgaacagacaaagaaactggcacaaatgctagaacactttaataagccagaccttgttctacctgtgtcatctactgatgacacaggcaagaccagacctataagctcttgggagaagttcttcttgacccgtgattgtttcttaagatatctaagagctcaaaaatgggatgtccctaaagctatcaaaatgctaacagagacacttgtttggagacgtgaagtcgggatcacacatggagaagaagatgagcacccattgaaacccgaagatattgctgttgagaatgaaacaggtaaggaaattcttctaggttttgattacgatcgcagaccattgttttatatgaagaatggtcgacaaaatactgaatcctctttcaggcaagtacaacagatgctcttcatgatggaatgtgccaccacattaaccccacaaggtgttgagaagatgtgtgtcttagttgatttcaaacattataaagaacctggtatcattactgataaggctccaccaatttcaattgcaaaaatgtgtctacatattatgcaaaatcattatccagaaagacttggaaaatgtattctgattaacataccatggtttatctgggctttcctaaaaatgatgtacaatttccttgatccagcaaccaaagaaaaagtaattttcgatgaaccatttacaaatcatattgatccaagtcaacttgaagctacgtatgatggtagacttgattttaagtataatcatgctgtctattggcctgatatgaatgccaaaattgaagctattcgtaacaagcagtatgaacgttttcaaaaatttggtgccgttatggggctcagtgagtgggatctaaaaggtgaccatgatgaacttgtgtaccctgtagattcaattaaagcttaa

SEQ ID NO: 7583 - protein, 347 aa, Candida glabrata CBS138
MGIFSRKKKEATPVNRGDLIPCETMIEAPPKGSPPPKKPADLDAEQTKKLAQMLEHFNKPDLVLPVSSTDDTGKTRPISSWEKFFLTRDCFLRYLRAQKWDVPKAIKMLTETLVWRREVGITHGEEDEHPLKPEDIAVENETGKEILLGFDYDRRPLFYMKNGRQNTESSFRQVQQMLFMMECATTLTPQGVEKMCVLVDFKHYKEPGIITDKAPPISIAKMCLHIMQNHYPERLGKCILINIPWFIWAFLKMMYNFLDPATKEKVIFDEPFTNHIDPSQLEATYDGRLDFKYNHAVYWPDMNAKIEAIRNKQYERFQKFGAVMGLSEWDLKGDHDELVYPVDSIKA

SEQ ID NO: 7584 - DNA, 1020 bp, Kluyveromyces lactis NRRL Y-1140
  CDS (1)..(1020)
atgaggttattccagcgaaagggaaatgacctaatcagacaacctgcagatctaattccatgtgatacgttcatttctgatccaccactgcgatatacaaaaccgcatcgacaaccagagttagacaatgagcaacaagtgatataccatgctgtactgcaacacttcagtgatccgcagttgcgtttgcctgtaaatggacatgcggaagatctacaggactcaaataactattcaacgttaggagactgggagaaattctggctttcgagggagtgtatcctgagatatctgagggcaaccgcttggaatgctgaacaaactattagaaggttgcataacacgttactatggagaaggcagttcggattggctgattatgcaaatctaaaagaaacagccacctccgttgccaatgaaaatgatactggtaagatatcattacttggatatgacaggaagagtcaattagtacttatactgaagaacggcagacaaaacacagatccaagctttgaacaaattcgacagattgtttggtttttagaagctgcatcgatacttgctcctaaaggtacggaatgctggacactaatcatcgatcttaaaaatcatcatatagacaacggtggaacccgttccctatacgaatacccaccactctctcttgcgaagcaagtgatcaatatatttcaagatcattatccagaaagactatacaaatgtttaatctgcaatgtcccaaattctgcgtggacattcttgaaattagtgtacccactaatagaacccgaaccaagaaagaaaatcctttataatgacccccttgaaatccatatagaatcagatcaattgggtgctgaatacggtggtagattggatttcaattacgataactcgatttactggccggatttaatacagaccgttgaatcaagaaagaaagtacaatacgaaaagtttgaagccttgggtgcaaacgttgggataagagaatttgaaataaagagaaatacttaa

SEQ ID NO: 7585 - protein, 339 aa, Kluyveromyces lactis NRRL Y-1140
MRLFQRKGNDLIRQPADLIPCDTFISDPPLRYTKPHRQPELDNEQQVIYHAVLQHFSDPQLRLPVNGHAEDLQDSNNYSTLGDWEKFWLSRECILRYLRATAWNAEQTIRRLHNTLLWRRQFGLADYANLKETATSVANENDTGKISLLGYDRKSQLVLILKNGRQNTDPSFEQIRQIVWFLEAASILAPKGTECWTLIIDLKNHHIDNGGTRSLYEYPPLSLAKQVINIFQDHYPERLYKCLICNVPNSAWTFLKLVYPLIEPEPRKKILYNDPLEIHIESDQLGAEYGGRLDFNYDNSIYWPDLIQTVESRKKVQYEKFEALGANVGIREFEIKRNT

SEQ ID NO: 7586 - DNA, 1047 bp, Debaryomyces hansenii CBS767
  CDS (1)..(1047)
atgttttcaaagttaagaggtaaagattctaaaaccgagactaagaaggaacagaaagttttgggagaaaagttataccttccattaactaaggcttcttctaaatgtacaattcctgaagcgatcgggcttaacggtgaagaacaagaaaaatatgataaagttttgaaatatttccagcaggaagacttcaaggtcgctgtgagtgaagctaaccagaaggataaggatagttccaagtacaaggaattgagcgagtcggaaaaagcgtggttgacgagagaatgctttctccggtatttgcgggccaccaaatggcactatgaagatactattagccggattgagcttactcttgcgtggagacgtgagtttggtattgctgggtgctacgactcggaaaacgaggttaatgggaaattgtgctctccagagaacgaaacggggaaggaagttatcttgggatatgataacgataccagaccgtgtttatatttgaagccgggacgtcaaaatacaaagacgtccttgagacaggttcagcacatggtatacatgttagaaagagttatagattacatgccttcgggccaggattcgttggcgttgttgatagacttcaaggcctcgcctcttggtaccgaaggaggaaagattccaccggtgggtacggggagacaggtgttgcatatcttacaaacacattatccagagagattgggtaaggcattgttgaccaatattccatggttgggatggacgttcttgaagattatacatccatttatcgatccattaacgagagaaaaattggttttcgatcagcctttcccagagtatgttccaatagagcagttggataaggattttggaggtgaccttaatttcgaatacgaccacgagaaatactggcctgaaatgatcaaaattgctgaaagtaataagcaaaagtacatgaagagattcgaaaattttggttccaagatcggtttatcagaatatgatttaagaggcgaaagtgaagaattggtttatccagttgcataa

SEQ ID NO: 7587 - protein, 348 aa, Debaryomyces hansenii CBS767
MFSKLRGKDSKTETKKEQKVLGEKLYLPLTKASSKCTIPEAIGLNGEEQEKYDKVLKYFQQEDFKVAVSEANQKDKDSSKYKELSESEKAWLTRECFLRYLRATKWHYEDTISRIELTLAWRREFGIAGCYDSENEVNGKLCSPENETGKEVILGYDNDTRPCLYLKPGRQNTKTSLRQVQHMVYMLERVIDYMPSGQDSLALLIDFKASPLGTEGGKIPPVGTGRQVLHILQTHYPERLGKALLTNIPWLGWTFLKIIHPFIDPLTREKLVFDQPFPEYVPIEQLDKDFGGDLNFEYDHEKYWPEMIKIAESNKQKYMKRFENFGSKIGLSEYDLRGESEELVYPVA

SEQ ID NO: 7588 - DNA, 1095 bp, Debaryomyces hansenii CBS767
  CDS (1)..(1095)
atgaatatatttagaaggaaagatactagtacgtcgagtctctccaattcaaccagcgaagctgcttcagtttcgtctaaatcaagtactgcaagtaccaccacttcaaaaaaaggttcaaagttgataaaatgccacacaccttttgataaacctgtcaaccccgtcaaacccccagtatttgatttatcagaagaagaacagaagaaatacgatgaagttttgaagcactttcaagaacacgtcaaaaaagacttgccagtaaatgatcaagcaggtgccgcaaagcacgcggtactcgatgaagagatagcatggttgactaaagagtgtttcttacggtacttacgagcctctaaatggaggctagagactgccatcaagcgtattgaagaaactcttatttggcgtagaactttcggagttgtagaaattcctcaacataccgatccgaaaataattattacaccggaattagtggaagaggagaatgtcactggtaaaaaccttattgttggatatgataatgataatagaccctgtctttatcttagaaatggttaccaaaatacctcaccatctataaagcaggttcaacatttggtgtttatgttagaaagagttattcaatttatgcctccaggacaagatacattagctctattgattgacttcaaagctgcaccagcccacatgaacctctcatctaaattcccatcattatccatatcaaaacaagtattgaacattttgcaaggccattatccagaaagattaggtaagggtttattcaccaatattccttggattggttacacatttttcaaagtcgttggaccattcatagacccatatacgaggctgaaaactatttacgatcaaccatttgaaaacttcgttcctaaagaacaattggacaaagagttcaacggaaacttggatttcgagtatattcatgatgtttactggaaagaaatgaatgtgatggcagaaagaaaacgtgaaaactacgtcaagaattttcatcgattaggtgcaaaagtcggtttgagcgaatacgacttaagactaatccacaatgatgattctcaatag

SEQ ID NO: 7589 - protein, 364 aa, Debaryomyces hansenii CBS767
MNIFRRKDTSTSSLSNSTSEAASVSSKSSTASTTTSKKGSKLIKCHTPFDKPVNPVKPPVFDLSEEEQKKYDEVLKHFQEHVKKDLPVNDQAGAAKHAVLDEEIAWLTKECFLRYLRASKWRLETAIKRIEETLIWRRTFGVVEIPQHTDPKIIITPELVEEENVTGKNLIVGYDNDNRPCLYLRNGYQNTSPSIKQVQHLVFMLERVIQFMPPGQDTLALLIDFKAAPAHMNLSSKFPSLSISKQVLNILQGHYPERLGKGLFTNIPWIGYTFFKVVGPFIDPYTRLKTIYDQPFENFVPKEQLDKEFNGNLDFEYIHDVYWKEMNVMAERKRENYVKNFHRLGAKVGLSEYDLRLIHNDDSQ

SEQ ID NO: 7590 - DNA, 1137 bp, Oryza sativa (japonica cultivar-group)
  CDS (1)..(1137)
atgagctccgcaagcggtgtgaacaatggtgatggaaaagaagcggcactgtttgagcagcggctatccaagattggtgaagttagagctgccctaggacaactatcaggaaaagctgcgctatattgctcagatgcttcgattgcgaggtacctggtagcgaggaactgggaagtgaagaaggccacgaaaatgctgaagaaaaccttgaaatggcgttcagagtataagccagatgagatccgttgggatgagatagcaaacgaagctgcaactggaaaaatctaccgaactgattactttgacaagagtggacggagtattcttgtcatgagacctggagttcagaataccaagaaggccaaggggcagatcagatatttggtatactgtatggagaatgcaattctgaatcttccgcatgaccagagtcagatggtttggctcattgattttgctggattctcattatctaacatatcacttcatgtgacaaagttgacagcagatgtcctacaaggtcactatcctgaaagattgggtgttgcaattctttacaatgctcctaagttttttgagtctttctggaagatcgcaagccccattcttgagccaaagactttcaacaaggtcaaatttgtatacccagataggcctgagactaacaagatcatggaagacctttttaacatggaagaattagaatctgcatttggtggcaaaaaccaggctacttttaacataaatgattatgctgcaaggatgagagaagatgacatcaagatgccattgttctggagtcctgaaaattctgctcttgcttcagagccatatgtgatggtgaacaaggacatggcacaagaaggtagttcaggtttgaagagtgaagagactgcatctgaaaagagggaagaaacagatactgaatctgaaaacagggaagaaacagagagtgaatctgagagggcagaaatagactctgtatctgggaagagggaagaaacagtggctgtatctgacaagagagaagaaaaagagactgaatctgaaaatgggaaagccgcagtgacttcatcaaacggagttgagctgacaagcttgccaggcgaaggtaaaggtataaccccggcagattga

SEQ ID NO: 7591 - protein, 378 aa, Oryza sativa (japonica cultivar-group)
MSSASGVNNGDGKEAALFEQRLSKIGEVRAALGQLSGKAALYCSDASIARYLVARNWEVKKATKMLKKTLKWRSEYKPDEIRWDEIANEAATGKIYRTDYFDKSGRSILVMRPGVQNTKKAKGQIRYLVYCMENAILNLPHDQSQMVWLIDFAGFSLSNISLHVTKLTADVLQGHYPERLGVAILYNAPKFFESFWKIASPILEPKTFNKVKFVYPDRPETNKIMEDLFNMEELESAFGGKNQATFNINDYAARMREDDIKMPLFWSPENSALASEPYVMVNKDMAQEGSSGLKSEETASEKREETDTESENREETESESERAEIDSVSGKREETVAVSDKREEKETESENGKAAVTSSNGVELTSLPGEGKGITPAD

SEQ ID NO: 7592 - DNA, 900 bp, Oryza sativa (japonica cultivar-group)
  CDS (1)..(900)
atgtttagctttaggaaaaagcatgcctctcgcttcgattcagatgacattgagcaacaagaagcaaagatccaagagctcagagctgcacttgggccgttgtcttcctctggtaagaaatattgtactgaagcatgcttgagaagatatctagaggcccgtaactggaatgttgataagtccagaaaaatgttggaagaaagtcttaagtggagaacagcttacaggccagaagacattcgttggcccgagatttctgttgaatcagaaacaggtaaaatgtacagagcaagttttgtagatagagaggggagaactgtcgtcattatgagacccgcaaagcagaacacatcgtcccatgaagggcaggtacggtttcttgtatatacgttggagaatgcaatcctcagcttgcctgaagatcaagagaaaatggtttggttgatagatttcacaggatggaccttggcaaatgcgacacccataaagactgccagagaatgtgcaaatatcctgcaaaatcattaccctgagaggttggctatcgggatcctgtttaatccccccaaagtatttgaggctttttggaaggttgtcaaacatttccttgacccaaaatcaatccagaaggtgaattttgtatacctgaagaacgaggagagcatgaagatcctgcacaagtacattgatccagaagtccttcctgtagagtttggaggaaagaacaatgtggtgtacagccatgaggagtactccaagttgatggtgaaagatgacattaaaatggcaagcttttgggcatcggatacaaaaactgaccatgttaacaaagtcattaacgagcactccgtccccgaggttacgcaacagtcgtcgctggtggctgcgaaagcgagctga

SEQ ID NO: 7593 - protein, 299 aa, Oryza sativa (japonica cultivar-group)
MFSFRKKHASRFDSDDIEQQEAKIQELRAALGPLSSSGKKYCTEACLRRYLEARNWNVDKSRKMLEESLKWRTAYRPEDIRWPEISVESETGKMYRASFVDREGRTVVIMRPAKQNTSSHEGQVRFLVYTLENAILSLPEDQEKMVWLIDFTGWTLANATPIKTARECANILQNHYPERLAIGILFNPPKVFEAFWKVVKHFLDPKSIQKVNFVYLKNEESMKILHKYIDPEVLPVEFGGKNNVVYSHEEYSKLMVKDDIKMASFWASDTKTDHVNKVINEHSVPEVTQQSSLVAAKAS

SEQ ID NO: 7594 - DNA, 993 bp, Yarrowia lipolytica CLIB99
  CDS (1)..(993)
atggccgcccatttcgatcccccggagtacccctgcaaaaagtcgaccttgccgccccgtcccaagctcaccggcgagcaggagggcaagtacaaacaggtgctccagtttttgcaggagaagacggagtttccaacctcggaaaagggcgcggagaaaaacagcgggcccatggagccgctgacagacgaggaaaaggcgtggctgtcggaggagtgcattttgcggtacctccgggccacaaagtggaacgttgcggacgcgcagaagagactgctatctacgctcggctggagacgtgaatttggagtggagcgaacccgatccaacacaattaccgcagaccgagttgctgtagagaacgagagcggaaaggagttgattttcggctttgacaacgactcgcggccgtgcttggccctcagaaacggccgccagaacaccgaggcgtcgcacagacaggtggaacacatgtttttcatgctggaacgagcaatcgactacatgcctcccggacaggagcagctggctctgctgatcgacttcaaggcccacaccaagctcggcaagaaggtgccctccatgaccaccggacgacaggtgcttcacattctgcagacacactaccccgagcgtctaggcaaggctctgctgaccaacctgccctggatcgcctggacctttatgaagatcatccaccccttcattgatcccaccactcgagagaagctggttttcaccaagcccttccccgactacgtgcccaaggagcagctggagaaggagtacggaggagacgtggactttgagtaccagcatgccaagtactggcccaagatgaatgagattgccgacaagaagcacgccgctttcatggcgcaataccacaagcttggaggaggcatcggactcagtgaggagaagatgcgacagcctctggatgctgacgaccaggccactttggtgggaggaatgaagaagctgtccgtttaa

SEQ ID NO: 7595 - protein, 330 aa, Yarrowia lipolytica CLIB99
MAAHFDPPEYPCKKSTLPPRPKLTGEQEGKYKQVLQFLQEKTEFPTSEKGAEKNSGPMEPLTDEEKAWLSEECILRYLRATKWNVADAQKRLLSTLGWRREFGVERTRSNTITADRVAVENESGKELIFGFDNDSRPCLALRNGRQNTEASHRQVEHMFFMLERAIDYMPPGQEQLALLIDFKAHTKLGKKVPSMTTGRQVLHILQTHYPERLGKALLTNLPWIAWTFMKIIHPFIDPTTREKLVFTKPFPDYVPKEQLEKEYGGDVDFEYQHAKYWPKMNEIADKKHAAFMAQYHKLGGGIGLSEEKMRQPLDADDQATLVGGMKKLSV

SEQ ID NO: 7596 - DNA, 1332 bp, Cryptococcus neoformans var. neoformans JEC21
  CDS (1)..(1332)
atgagcagcgataaattcatcagcaatcttttctctctgtctctctttgacaccccgcccaccgccatgtccttcttcaagtcaagatctgcctcggcgtccaccgcctccctcaagccagagtccttgggcccaaagaccagtgaggtcttcaccgtgcccccgcaagaatcgagcgtgaagaaaaggtgggagtatgatgatcatcaactcggcctcatcgcgcaactcaaagagtacaccaaaactatcgccctcccagagtctgacgagtactacccttgggagcagcgtttcctttctgatcctgctacccatgcccgatacatgcgcgccgctaaatggaagctccatgacggcaagcacaggatcaggggaacgatggaatggaggagggagtataagccagaactgatacagcccgatgatgttggtgttgaggccgagactggtaagattatccttacaggcttcgatatggatgcccgaccaatcctctacatgcgacccggtagggaaaacaccgagacgagcccgaggcaaattaggcatcttatctatcatcttgaacgagcaatcgacttgatgcctcctggtcaagaacaagtcgccatcatcgtcgactacaaatctgctacatcccaatccaatccttccattggtacagcccgcaaggtgctccacattctccagaatcattatgttgaacgacttgggaggggtttggtcgtcaacatgccatggtggatcaacgcctttttctccggtatctcccccttcatggaccccatcacccgcgacaagatccgattcaacccccgtctactcgacctcgtccccgccgcccacctcgactcagagttcggtggggactataatttcacatatgattattccgtttactggaagacgattaccgagttttgtcatattgctccgaacgggaggcgggtgcctcctccgggcaaggaggaggaggggaaggggagggaagggtggatcccgcctgcggggaatgggataaaagctgcggtggaggggtacgtgccgaaagaggggaccgtgaagagcggagaaatcgtcaaggctggcgaaaagaatgaaaagtcagagaagacggggaagggtgctgccgctacaagtgcaaatggcgtcgccggtgccgctcctaccgcttcctccaccaccgcccccgccccaccagaaaaagaaatggaatccctagccatccaaacagcccctggcgaaccaatcggcgggtccgtgtttgatcatccgcctagtgagggtgaagtgcatgaggcgaagaagagtttgaatgtttctgcgtaa

SEQ ID NO: 7597 - protein, 443 aa, Cryptococcus neoformans var. neoformans JEC21
MSSDKFISNLFSLSLFDTPPTAMSFFKSRSASASTASLKPESLGPKTSEVFTVPPQESSVKKRWEYDDHQLGLIAQLKEYTKTIALPESDEYYPWEQRFLSDPATHARYMRAAKWKLHDGKHRIRGTMEWRREYKPELIQPDDVGVEAETGKIILTGFDMDARPILYMRPGRENTETSPRQIRHLIYHLERAIDLMPPGQEQVAIIVDYKSATSQSNPSIGTARKVLHILQNHYVERLGRGLVVNMPWWINAFFSGISPFMDPITRDKIRFNPRLLDLVPAAHLDSEFGGDYNFTYDYSVYWKTITEFCHIAPNGRRVPPPGKEEEGKGREGWIPPAGNGIKAAVEGYVPKEGTVKSGEIVKAGEKNEKSEKTGKGAAATSANGVAGAAPTASSTTAPAPPEKEMESLAIQTAPGEPIGGSVFDHPPSEGEVHEAKKSLNVSA

SEQ ID NO: 7598 - DNA, 1056 bp, Dictyostelium discoideum
  CDS (1)..(1056)
atgggaaaaaaagataaaaaaaataaaaatgaagaaaccactgcaacaaccacaaccacaacaactacaacaaaaagtgaacaagatatttcaacttcagatttaacagatagtaatacaaatagtgcatcatcagtaacaggtgaagataatgaaatatataataatacaaaatttgaagatggtggtgaatttaacccatttaaaaatttaagtgaaaaacaaattaatattttcaaacaatttaaagaaaaagtatggaaagatggtaatgaaaaatcaacaaacacaggatttggagagatatcagaaaaggagagagaatggttagaggatggtggtgatatgttattattaagatatttaagagcaagagattatgatctctctttatcattcaatctactaaagaatacattggaatggagaagcaaatataagccatacgagattacagccgaatcattatcctatgaagcatcctcaggtaaacaatacgtatttggtaaatcacatggcagaagtgttatctatcttagaccagtgagagagaatactaaaaaccatgataaccaaatcagattaatggtttacaacattgaaagagcaatatcattaatggataaaacacgtggccacgaacaaattgtattgttaatcgactttaaaaactattcaattagaaattcaccaccaatgtctgttagtaagtatgttcttcaaattttatccgaccattatccagagcgtctcggtaatgcctttttagtggaaactcccttcattttcaatgttttctggactaccatctcaccattcatcaataaagttacctataaaaagatcgttttcgcaaatggtgaaaaacaaaaaattaaagttttctcccaattctttgagccaaatgatttagaaaaagaattcactggtgcctcagatcatgaatatgatcatcataactattggaaaaatgaaattatactcaatagaaatgaacgtaatttacaaccattatctgacgatgaaattttaacaatattaaattcaaaagaataa

SEQ ID NO: 7599 - protein, 351 aa, Dictyostelium discoideum
MGKKDKKNKNEETTATTTTTTTTTKSEQDISTSDLTDSNTNSASSVTGEDNEIYNNTKFEDGGEFNPFKNLSEKQINIFKQFKEKVWKDGNEKSTNTGFGEISEKEREWLEDGGDMLLLRYLRARDYDLSLSFNLLKNTLEWRSKYKPYEITAESLSYEASSGKQYVFGKSHGRSVIYLRPVRENTKNHDNQIRLMVYNIERAISLMDKTRGHEQIVLLIDFKNYSIRNSPPMSVSKYVLQILSDHYPERLGNAFLVETPFIFNVFWTTISPFINKVTYKKIVFANGEKQKIKVFSQFFEPNDLEKEFTGASDHEYDHHNYWKNEIILNRNERNLQPLSDDEILTILNSKE

SEQ ID NO: 7600 - DNA, 744 bp, Dictyostelium discoideum
  CDS (1)..(744)
atgagtggatacgttggaaacctttcaccagaacaagaacatcaattaggtattattaaatctaaaattgcagaaattaatgatccagttgtagaaaaagaaattcaacaattagatgattctatgaccttaagatttttaagagctagaaaatggaatctaaaagattcatttgatatgctctatgaagcattaaaattccgagcaacatttcaagatgttggagttgaaggtataacagaatcaatggttgttaatgaattaaagagtggtaagagttatttccatggtgttgataaaggtggtagaccagtttgtattgttaaaaccagtagacatgatagttacaacagagatttgaatgaatcgatgagatattgtgtctacgtaatggaaaatggtaaatcaatgttaaaggacggtattgaaacttgtacacttattttcgatatgtctgattttagttcaaaaaatatggattatccattggttaaatttatggttgaattatttcaaaagttttatccagaatcattacaaaaatgtttaattttaaatgcaccttggatctttatgggaatttggcatatcatcaaacattggttagatccaaataccgcttcaaaagtttcttttgtcaaaactaaacaattggttgattatattccaaaagatcaattagaaagttcttatggtggaacaagtacatttaaatatacttatgaaggaaaagaagtaaagtaa

SEQ ID NO: 7601 - protein, 247 aa, Dictyostelium discoideum
MSGYVGNLSPEQEHQLGIIKSKIAEINDPVVEKEIQQLDDSMTLRFLRARKWNLKDSFDMLYEALKFRATFQDVGVEGITESMVVNELKSGKSYFHGVDKGGRPVCIVKTSRHDSYNRDLNESMRYCVYVMENGKSMLKDGIETCTLIFDMSDFSSKNMDYPLVKFMVELFQKFYPESLQKCLILNAPWIFMGIWHIIKHWLDPNTASKVSFVKTKQLVDYIPKDQLESSYGGTSTFKYTYEGKEVK

SEQ ID NO: 7602 - DNA, 1110 bp, Candida albicans SC5314
  CDS (1)..(1110): transl_table=12
atgtttgcacaattaataaataaaggatttactgcaccacctccagttgctactactggttcaccaacttcttcttcatgggaaatcaccaccaccaccaacgaaaaatcatctagtaccactagtttatccacagtttatattccattttccactccttcatccgaatcacatatcccttcagaaccagaattaactcaagaacataaagataaatatttacatgtattaaaccatttccaacaatcagatttaaaaattgctattagtgaagaaactcataaacataaacaaaaaactaaagaattaactattggtgaaaaatcttggatcactagagaatgtatattacgttatttacgagctactaaatggcatgaatctgaggcaattgatcgtattgaattaaccttaagttggagacgtgaatttggtatatccgaaccatttgataatgaaaataaagttaatggtgaattagttagtgaagaaaatgaaactggtaaagaagtcatattaggttatgataatgattcacgtccctgtttatatttaaaaccaggtcgacagaatactaaaactagtgaacgtcaagttcaacatttagtttatatgttggaaagagtcattgattatatgcctgcgggacaagattcattagcgttattaattgattttaaagcacatcctgttggtactcaactggggaaaatccctcctgtaggaattggtagacaagttttacatattttacaaactcattatcctgaaagattaggtaaagcattattaacgaatataccttggttaggttggacttttttaaaaattattcatccatttattgatccattaactagagaaaaattagttttcgatcaaccatttataaattatgtacctaaagaacaattggataaagattttgaaggattagttaattttgaatatgatcataaaaaatattgggatgtaatgataaaaatatctcaagataaaaaacatcaatattttgaacgatttgagaaatttggtggaatcgttggattaagtgaagttgatttaagaggtaataatgaagaattaattcatcccgttggatccatctaa

SEQ ID NO: 7603 - protein, 369 aa, Candida albicans SC5314
MFAQLINKGFTAPPPVATTGSPTSSSWEITTTTNEKSSSTTSLSTVYIPFSTPSSESHIPSEPELTQEHKDKYLHVLNHFQQSDLKIAISEETHKHKQKTKELTIGEKSWITRECILRYLRATKWHESEAIDRIELTLSWRREFGISEPFDNENKVNGELVSEENETGKEVILGYDNDSRPCLYLKPGRQNTKTSERQVQHLVYMLERVIDYMPAGQDSLALLIDFKAHPVGTQSGKIPPVGIGRQVLHILQTHYPERLGKALLTNIPWLGWTFLKIIHPFIDPLTREKLVFDQPFINYVPKEQLDKDFEGLVNFEYDHKKYWDVMIKISQDKKHQYFERFEKFGGIVGLSEVDLRGNNEELIHPVGSI

SEQ ID NO: 7604 - DNA, 1110 bp, Candida albicans SC5314
  CDS (1)..(1110): transl_table=12
atgtttgcaaaattaagaaataaagtatctactccaccacctccagttgctactactggttcaccaacttcttcttcatcggaaatcaccaccaccaccaacgaaaaatcatctagtaccgctagtttatccacagtttatataccattttctactccttcatccgaatcacatatcccttcagaaccagaattaactcaagaacaaaaagataaatatttacatgtattgaaacatttccaacaatcagatttaaaaattgctattagtgaagaaactcataaacataaacgaaaaactaaagaattaactattggtgaaaaatcttggatcactagagaatgtatattacgttatttgcgagctactaaatggcatgaatctgaggcaattgatcgtattgaattaaccttaagttggagacgtgaatttggtatatccgaaccatttgataatgaaaataaagttaatggtgaattagttagtgaagaaaatgaaactggtaaagaagtcatattaggttatgataatgattcacgtccctgtttatatttaaaaccaggtcgacagaatactaaaactagtgaacgtcaagttcaacatttagtttatatgttggaaagagtcattgattatatgcctgcgggacaagattcattagcgttattaattgattttaaagcacatcctgttggtactcaactggggaaaatccctcctgtaggaattggtagacaagttttacatattttacaaactcattatcctgaaagattaggtaaagcattattaacaaatataccttggttaggttggacttttttgaaaattattcatccatttattgatccattaactagagaaaaattagttttcgatcaaccatttataaattatgtacctaaagaacaattggataaagattttgaaggattagttaattttgaatatgatcataaaaaatattgggatgtaatgataaaaatatctcaagataaaaaacatcaatattttgaacgatttgaaaaatttggtggaatcgttggattaagtgaagttgatttaagaggtaataatgaagaattaattcatcccgttggaaccatctaa

SEQ ID NO: 7605 - protein, 369 aa, Candida albicans SC5314
MFAKLRNKVSTPPPPVATTGSPTSSSSEITTTTNEKSSSTASLSTVYIPFSTPSSESHIPSEPELTQEQKDKYLHVLKHFQQSDLKIAISEETHKHKRKTKELTIGEKSWITRECILRYLRATKWHESEAIDRIELTLSWRREFGISEPFDNENKVNGELVSEENETGKEVILGYDNDSRPCLYLKPGRQNTKTSERQVQHLVYMLERVIDYMPAGQDSLALLIDFKAHPVGTQSGKIPPVGIGRQVLHILQTHYPERLGKALLTNIPWLGWTFLKIIHPFIDPLTREKLVFDQPFINYVPKEQLDKDFEGLVNFEYDHKKYWDVMIKISQDKKHQYFERFEKFGGIVGLSEVDLRGNNEELIHPVGTI

SEQ ID NO: 7606 - DNA, 1095 bp, Candida albicans SC5314
  CDS (1)..(1095): transl_table=12
atgaacttttttaggaagaaaacagaagaggatagagatagttcctcatcaagtcttccccgagatgacacagcttctgtttcatcaaaagcaacaagcacaagcacaaacactacttcaaaagtggaactcgtcaaatgttatattccctttgaacaaccggtgaaccctattaaagcacctgattttgaactcgataaagaacaaattgaaaaatatgaaaagttggtagcatattttgaagattatatttcgaaggagatacctgtaaatgaccagcataatgctaccacgcatccactcattgaagatgagttggcttggttgacgaaagaatgctttctcagatatttaagagccacaaaatggaaggtggatgctgctatcaagagaatcgaggacactatcatttggagaaggacattcggggtcgctaacataccaaaccatacagatcccaagaaattaattacagcagatttggtatctgatgaaaacgaaactgggaaacagttgattgtgggatatgataatgacaacagaccatgtctttatttgcgtaatggttatcaaaacactgctcctagtctcaaacaggtccagcatttggttttcatgcttgaaagggttatacactttatgccgcctggccaagatagtttggccctattgatcgattttaaagcggctccagctgaacttaatttgtcgtctaaatttccatcattgtctacgtcaaaacaatgcttgcacattttacaaagtcattatccagaacgattaggaagaggcttgtttacaaacattccttggatcggctatactttcctcaaagttgttggtcctttcattgatccacacacgagactgaaaaccatttatgatcaaccatttgaaaattttgttcccaaagaacaattggacaaagaattcaacggtatattagattttgaatacattcatgatacatattggccaaaaatgaatgagattgccgacagaaaaagagccaactacatggagaatttcagaagattgggatcaaagattgggttgagtgaatacgaccttagattagaacaagctgcattataa

SEQ ID NO: 7607 - protein, 364 aa, Candida albicans SC5314
MNFFRKKTEEDRDSSSSSLPRDDTASVSSKATSTSTNTTSKVELVKCYIPFEQPVNPIKAPDFELDKEQIEKYEKLVAYFEDYISKEIPVNDQHNATTHPLIEDELAWLTKECFLRYLRATKWKVDAAIKRIEDTIIWRRTFGVANIPNHTDPKKLITADLVSDENETGKQLIVGYDNDNRPCLYLRNGYQNTAPSLKQVQHLVFMLERVIHFMPPGQDSLALLIDFKAAPAELNLSSKFPSLSTSKQCLHILQSHYPERLGRGLFTNIPWIGYTFLKVVGPFIDPHTRSKTIYDQPFENFVPKEQLDKEFNGILDFEYIHDTYWPKMNEIADRKRANYMENFRRLGSKIGLSEYDLRLEQAAL

SEQ ID NO: 7608 - DNA, 1155 bp, Aspergillus fumigatus Af293
  CDS (1)..(1155)
atgtctgcaccgtcagaagctcccgctgcaactgtttcagtcaccgactctcaggccaattcggctccatcaaactccattaaggatcaaacctctgctgcgactacagtgcaatccaaggctcaggttccgccttctaatactagtgcgagggatgagaaagataatgaattggaccttccaacttccgctgcagatggcctcgttcagaagccatttcctcgccctcttgacacatcaaaggcagcggctcctgctgagctaacccctgatcagcaatcgaaatatgaggcagtcctgaaggcagtttccgaatggaccactcttccgacaacatcggcaaaaaatgcacccacggccccaattacagatgatgagcgcatgtttttgacccgcgaatgtcttctgcggtacttacgcgctacgaaatggaatgtcaccgaagctatcaatcgacttcagcgcactctcacttggcgccgcgaatatggcctggaaaagctgactccggattacatctcgattgaaaacgagacaggaaaacaggtcatcctcggatacgacatccatgcacgaccctgtctctacctcttgccctccaaccagaacacggaaaaaagtgaccgccagattgagcacctagtcttcatgctggagcgcgtgattgaccttatggggccagaccaggaaactttggcacttatcgtaaatttcaatgagacgaagtctgggcaaaacgcgagtttgggtcaagctaagcaggcgctcaacattcttcaaaaccactaccctgagagactgggacgggcattagtgatcaacgtgccgttcgtcatttggggcttcttcaagctgatcaccccgttcattgaccctttgactcgggagaaactgaagttcaacgaagatcttcggcagcatgtgcctgccggccacctgatgaaatccgtaggtggtgatgtggaattccgatatgatcattccatttactggccggcattgaatcagctggctgataagagaaggaacgagtaccgacagcgctggatccagggaggcaaacgtatcggagagtttgagcgctatctcaagaccggcaccagccccagtctttcacaatccgagggcaccaacggggttagcgagaagtcgtga

SEQ ID NO: 7609 - protein, 384 aa, Aspergillus fumigatus Af293
MSAPSEAPAATVSVTDSQANSAPSNSIKDQTSAATTVQSKAQVPPSNTSARDEKDNELDLPTSAADGLVQKPFPRPLDTSKAAAPAELTPDQQSKYEAVLKAVSEWTTLPTTSAKNAPTAPITDDERMFLTRECLLRYLRATKWNVTEAINRLQRTLTWRREYGLEKLTPDYISIENETGKQVILGYDIHARPCLYLLPSNQNTEKSDRQIEHLVFMLERVIDLMGPDQETLALIVNFNETKSGQNASLGQAKQALNILQNHYPERLGRALVINVPFVIWGFFKLITPFIDPLTREKLKFNEDLRQHVPAGHLMKSVGGDVEFRYDHSIYWPALNQLADKRRNEYRQRWIQGGKRIGEFERYLKTGTSPSLSQSEGTNGVSEKS

SEQ ID NO: 7610 - DNA, 1617 bp, Ustilago maydis 521
  CDS (1)..(1617)
atgtcgttcgaagccaacgatctgagcaaaaccacctcgaggggctctagcacccgctcttccctcttcagccgtgcttccggattcgtcatgggctctgcttctcgacgccatccacatccacatccaccagcaccagcgtctgattctcaagctgccagctccgtctcgagtcccaacatgccctccaacgacaccatgaccgactacagcaagcccgaatccagcgatgccgccagaggtccacgcaagttcgaccacatttttgcgacacccgatccaagtgtcaagctcgcaccgcccactgcgctctctgattcgcagcaggaaaagtacgaccaaatgctcgagcatttcacctcgaccaaactgtttcccaccagcctcaagcccaactctgccaagaaaccgctcgacgactgggaaaagatgcgcaacctttcgcgcgaatccatgatccgctacctccgcgccaccaagtgggacgtggcatcggctaagaaacgtcttactgataccatcgcatggaggcgcgagtacggcgtcgatagtctcaaggcggaagacctcgagcccgaagccatgacgggtaaggaaaccatcctaggatacgacaacaagggtcgtccgctccactacatgcatccatcgcgcaacacgaccgaagagacgccgcgtcagatgcagtttgccgtgtggatcctggagcgtgccatcgatctcatgcctccgggtgtcgaaatgcttgcactgctcatcaactttggcggtaagaagcgtaaccccacttcgatcagcaatgccaagctcatgctgtacattttgcagaaccattatgtggagcgattgggcattgcactctgcatcaacgtgccttggatcttcaaggcattctggaacgccatctatccgtttatcgacccggtcaccaaaggcaaatgcaaatttgacgaagcgatcaaggacgaagttcctaatgggcagttggcgtcggattttggtggcttgctcgactttccttatgaacacgaaaagtactggccccagctggtcgagctaaccaacaagaggagagaggaacagatggaaaggttcaagacgctgtgcggcgccgaaatcggtgctagcgagtgggtgatccgaggtggtgacgcgccgaaccgctcaactgcgcccaagaagcaagattccgggtaccacgaggtcgagtccaagtctttgcctgcctatcaaccagccgcaggcagcagcgagaacgaaagtcaactcgatcgattctacacgtctccaagcgagctgccacctgaattggaacgacagctggatgagtcggattccgagaacaacactgtcgtcaacgatgatcacgcgtcctcggctgtagatgcaacgccgcaaaggaaggagcacaagcaaggcgatgcaagtctgtttgccgctgtcgtcggcggcgtctcggcggggctcgtcggcggtaaagcggcgtcggatgctgccgagcaggcaggtaagaacgcaggtgacgaagcgcaaaaacaccatcagcacttgagtcacatcaaggccgttcttggtagaaagagcgatggcgagtcaagaccagccgtctctgcgtag

SEQ ID NO: 7611 - protein, 538 aa, Ustilago maydis 521
MSFEANDLSKTTSRGSSTRSSLFSRASGFVMGSASRRHPHPHPPAPASDSQAASSVSSPNMPSNDTMTDYSKPESSDAARGPRKFDHIFATPDPSVKLAPPTALSDSQQEKYDQMLEHFTSTKLFPTSLKPNSAKKPLDDWEKMRNLSRESMIRYLRATKWDVASAKKRLTDTIAWRREYGVDSLKAEDLEPEAMTGKETILGYDNKGRPLHYMHPSRNTTEETPRQMQFAVWILERAIDLMPPGVEMLALLINFGGKKRNPTSISNAKLMLYILQNHYVERLGIALCINVPWIFKAFWNAIYPFIDPVTKGKCKFDEAIKDEVPNGQLASDFGGLLDFPYEHEKYWPQLVELTNKRREEQMERFKTLCGAEIGASEWVIRGGDAPNRSTAPKKQDSGYHEVESKSLPAYQPAAGSSENESQLDRFYTSPSELPPELERQLDESDSENNTVVNDDHASSAVDATPQRKEHKQGDASLFAAVVGGVSAGLVGGKAASDAAEQAGKNAGDEAQKHHQHLSHIKAVLGRKSDGESRPAVSA

SEQ ID NO: 7612 - DNA, 2094 bp, Ustilago maydis 521
  CDS (1)..(2094)
atgtcgcgcttccttgggcggctctctcgcacgccttcggtccactcgatcagcagccaggcgtcggctgctgagcctcttcctccgaagacgtccgacattctcatcaaacctgcaccaggatgcacccccaaacccaccgagcctttgtctgcggagcagcaacgcaagctggcggatctcgaaaagtacgttcgtcaaattgcaaaggaacagccgcctaaagatgactacaaaacgtgggaggacaagtggttgaacgaacccaacctctaccaacgctaccttcgtgctgccaagggagatctcgacaatgccaaaaagaggatcaaatcgacgctcgattggaggagggatttccgtccagagattatcgcacctggcagcgtggccaaggaagcagagacgggcaagcagatcgtgtccggctttgacaacgatggcagaccgctcatctacctcaggccggcgagggagaacacgacacctagcgatgctcaagtgcgctacctcgtatggacgttggagcgcgccatcgatctgatgccaccaggtgtcgagaactatgccatcattatcgactaccacaaagctacgacccagtccaacccttccctctccaccgctagagccgtcgcaaacatcctccagaaccactacgtagaacgactgggacgtgcctttattgtcaatgtgccctggttcatcaacgccttcttcagtgccatcgtccctttcctggatcctgttaccaaagacaagatccgtttcaacgccaatctggtagactttgtgcctgcagaccagctcgatgccgagttcacgggaggtagatacaactacgagtgggactttgagaagtactggaacaccttgatcaaggtcggcgacatcgcagaggatggcactcgcaagaccaacagtgctgccgatgcgcaatcagcgcagcaaccaaagccggacgagacggaggctgacgctgtacagaagcacgctgatgctattgcagcctcgcagctcacggagcaaggcagcgcgatcggactcggtgcggctgctggagcaactactgcactcgccgttgtcgcgggcggcgctgctgctgctgctacggacgcctacgcctcggatacgaagacctcttcttcggcatacaagtacctgcaaagcacgtcggactacgaggagctgctctccaagtacgacacgttcctcttcgattgcgacggcgtgctctggtcgggcgatgagaccattccgcacgtggtctcggtgctgcaaaagctgcgtcaacgtggaaagtcggtcatctttgtgaccaacaacgcgtcaaaatcgcgccagacgtacctcaagaagtttgctagtatgaacatccaagcgtctctggacgaggtgttctcatcttcgtacgcttctgctgtgtacctgaagaaggtgctcaactttcctgcggaccgcaaggtgtacgtgatcggtatgcacgggatcgaagaggagcttgacgctgagaacattctacactgtggaggcacggatgcgcaagataacaagttcctaccagctctcgactttggctcgttgcaaaccgatgaagcgattgatcccaaggtgggtgccgtagtttgtggcttcgacatgcacatgtcgtatctcaagcttgccaaggctttcaagcatctcacacgacctggctttgacgggccggtggaagccgagggtatgggaggcggatgccatttcattttgaccaacgacgattcgacgttccctgctaaaggtggaccttggcctggagcaggaagtctttcggctccgttgatcttctcgaccaagcgcacgcctacgattgtgggcaaaccacacaagcccatgctcgactgcatcattgccacaaaacaatttgatcccaagcgcgccatcatggtgggtgaccgactcaacacggatatcgaatttgcgaaagccggggggatcgcaagcatgttggtgttgactggaatcagtaagagggacgagattgagggcccgcatgccaagacgataccggactacttgattgatagtttgggtgatttggatgctgtaccgtag

SEQ ID NO: 7613 - protein, 697 aa, Ustilago maydis 521
MSRFLGRLSRTPSVHSISSQASAAEPLPPKTSDILIKPAPGCTPKPTEPLSAEQQRKLADLEKYVRQIAKEQPPKDDYKTWEDKWLNEPNLYQRYLRAAKGDLDNAKKRIKSTLDWRRDFRPEIIAPGSVAKEAETGKQIVSGFDNDGRPLIYLRPARENTTPSDAQVRYLVWTLERAIDLMPPGVENYAIIIDYHKATTQSNPSLSTARAVANILQNHYVERLGRAFIVNVPWFINAFFSAIVPFLDPVTKDKIRFNANLVDFVPADQLDAEFTGGRYNYEWDFEKYWNTLIKVGDIAEDGTRKTNSAADAQSAQQPKPDETEADAVQKHADAIAASQLTEQGSAIGLGAAAGATTALAVVAGGAAAAATDAYASDTKTSSSAYKYLQSTSDYEELLSKYDTFLFDCDGVLWSGDETIPHVVSVLQKLRQRGKSVIFVTNNASKSRQTYLKKFASMNIQASLDEVFSSSYASAVYLKKVLNFPADRKVYVIGMHGIEEELDAENILHCGGTDAQDNKFLPALDFGSLQTDEAIDPKVGAVVCGFDMHMSYLKLAKAFKHLTRPGFDGPVEAEGMGGGCHFILTNDDSTFPAKGGPWPGAGSLSAPLIFSTKRTPTIVGKPHKPMLDCIIATKQFDPKRAIMVGDRLNTDIEFAKAGGIASMLVLTGISKRDEIEGPHAKTIPDYLIDSLGDLDAVP

SEQ ID NO: 7614 - DNA, 975 bp, Dictyostelium discoideum
  CDS (1)..(975)
atggaatcaacagcatcaacaagcgatagtgcatccgccataaccactggtttaagtgaagtagacattaatcaacaatctccaccaattatacttaaagagggtgagatttttgacccattaaaaaatttaaatgaaaaacaattagaagcattcaaagagattaaatcaaatttctcagatttaactgatccaactgatattgcattttgtacagatatgtgttttttaagatatttaagagctagaaattatattgtttcaaaatctgaaaaaatgttaagagacacattagaatggagaaagaaatttagaccacaagatatccaattaggtggtgatattagagaaattggttcagctggttgtgtttatgtaaataaaagagacaaaaaaggaagaccaatcatttttgcagttccaagaaatgatacactcaaaaatgtaccaagtgaactcaaatttaaaaatttagtttattggttagaacaaggtttcagtcgtatggatgaaccaaaaggtattgaacaattttgtttcattgtcgattataaagatttcggtagtggtaatatggatatgaaaacaaatttagaagctatgcactttttattagatcattgtccagaaagaatgggtcaatctttattccttgatccaccagcactcttttggtttgcatggaaaattatttcaccatttttaaatgaagttacactttcaaaagttagatttataaatagtaaaaaagttgatggaaaaagaacttttgcagaattattagaatatgttgatattgaaaatttggaacaaaatttaggtggtaatttagattataattacaatatcgatgaatacttgaaagaaaatccagatccaatcgtagatactccaccaatcactttttcctcgtgccgaattttttttcaatttattttattaatttattttattaatttaatcgactttatttaa

SEQ ID NO: 7615 - protein, 324 aa, Dictyostelium discoideum
MESTASTSDSASAITTGLSEVDINQQSPPIILKEGEIFDPLKNLNEKQLEAFKEIKSNFSDLTDPTDIAFCTDMCFLRYLRARNYIVSKSEKMLRDTLEWRKKFRPQDIQLGGDIREIGSAGCVYVNKRDKKGRPIIFAVPRNDTLKNVPSELKFKNLVYWLEQGFSRMDEPKGIEQFCFIVDYKDFGSGNMDMKTNLEAMHFLLDHCPERMGQSLFLDPPALFWFAWKIISPFLNEVTLSKVRFINSKKVDGKRTFAELLEYVDIENLEQNLGGNLDYNYNIDEYLKENPDPIVDTPPITFSSCRIFFQFILLIYFINLIDFI

SEQ ID NO: 7616 - DNA, 744 bp, Oryza sativa
  CDS (1)..(744)
atggcgggcaacagaggaggcgatgccggggaaggggagtggctcaaggtcgccgagctcagggccacggtggaagcccaggacccccatgccaaggaagtggacaacctgacgctgaggaggttcctgcgggcgcgagaccacaacgtggagaaggcgtcggcgatgctgctcaaggcgctccggtggaggagggaggcggtgcccggcggctcggtgccagaggagaaggtgcaaagcgacctcgacgacgacaaggtctacatgggcggtgccgatcggaccggtcgtcccatcctcctcggcttccccgtcaagaacttctccgccaaacgcgacatgcctaagttcaagagttattgtgtctacttacttgacagcatctgtgcaaggatccccagaggccaggagaagttcgtctgcatcgtggatctcaagggctggggttactccaactgcgacatcagagcttacatcgcggccatagagatcatgcagaattactacccggagaggctcggcaaggccctgatgatccatgtaccctacatgttcatgaaggcctggaagatgatctaccctttcatcgacaatgtcaccagggacaagttcgtgttcgtggacgacaagagcttgcaagaggtgctgcaccaggagatcgacgatagccagatcccggatacgttgggcgggaagctggcaccggtttccctcaagaacaacgcgcgaattaaccttgattag

SEQ ID NO: 7617 - protein, 247 aa, Oryza sativa
MAGNRGGDAGEGEWLKVAELRATVEAQDPHAKEVDNLTLRRFLRARDHNVEKASAMLLKALRWRREAVPGGSVPEEKVQSDLDDDKVYMGGADRTGRPILLGFPVKNFSAKRDMPKFKSYCVYLLDSICARIPRGQEKFVCIVDLKGWGYSNCDIRAYIAAIEIMQNYYPERLGKALMIHVPYMFMKAWKMIYPFIDNVTRDKFVFVDDKSLQEVLHQEIDDSQIPDTLGGKLAPVSLKNNARINLD

SEQ ID NO: 7618 - DNA, 771 bp, Glycine max
  CDS (1)..(771)
atggaagcagtgagagctggtcgagaaggagcaataggtctaggtcaaggtgatggcgtagccaaggacagcactgagactgaactcaccaaaatccgtctcctcagggcaattgttgaaacccgtgatccctcttccaaggaagaggatgattttatgattagaagattcctgcgtgctcgtgatttagatgtagagaaggcttcggcaatgctcctcaagtacttgaaatggagaaattcatttgttccaaatggctctgtatctgtgtcagatgttcctaacgaacttgcacaagataaggtgttcatgcaaggacacgacaagataggtcgacctatacttatggtcttcggtggaagacattttcagaacaaggatggtcttgatgaattcaagcgatttgttgtttatgttcttgataaagtatgtgcaagtatgccacctgggcaagaaaagtttgtcggtatagcagaacttaagggatggggatactcaaacagtgacgtgcgtggatatcttagtgctctatccattttgcaggattactacccagagagattggggaagttgtttattgtgaacgcaccatacatctttatgaaagtgtggcaaattgtttacccattcattgacaacaaaaccaagaaaaagatagtatttgtggagaaaaataaggtgaaatcaacactgctagaagagatggaggaaagtcaggtcccagagatattcggtggctcactgccattagtcccaattcaagatagctaa

SEQ ID NO: 7619 - protein, 256 aa, Glycine max
MEAVRAGREGAIGLGQGDGVAKDSTETELTKIRLLRAIVETRDPSSKEEDDFMIRRFLRARDLDVEKASAMLLKYLKWRNSFVPNGSVSVSDVPNELAQDKVFMQGHDKIGRPILMVFGGRHFQNKDGLDEFKRFVVYVLDKVCASMPPGQEKFVGIAELKGWGYSNSDVRGYLSALSILQDYYPERLGKLFIVNAPYIFMKVWQIVYPFIDNKTKKKIVFVEKNKVKSTLLEEMEESQVPEIFGGSLPLVPIQDS

SEQ ID NO: 7620 - DNA, 735 bp, Leishmania major
  CDS (1)..(735)
atgcccaccgcgaaggtgacggagaaggaggcggcgtgcgtgacggcgctcaagggcgagtacccggccagcaaggccgaccccgcagatgccggcttcctcagcgacagcacgtacctccgctttgcacgtgcgcacgatggcaacgtcaagaaggcttctgagctgcttggtgccaccttgaggtggcgcaagcagaccaaaccctacgccatcaccatggaggaggtccaaaacgcgatgaagcagacaaccatgtactgcggtggccgctgtaacattgggtgtcccgtgattgcgatggtccccggcatgcagaacgactgcaccgtcgaggagagaacgaagcagctggtgtacataatggaggagacccaccgcaagggctacgagcgcatcacctggatcatcgactttggtgccatgggcagtcaccgcgatgagcgcagcaaggaggcgcgcaaggagacaatgaagattttgcaggactactacccggagcgcatggcacgcatcctgctctaccggacgccgtggtatattcgcatgttactcggtgctgccaagatgttcatggatgcccggaccgcggcgaaggtctacaacgctgggagaactattgaggcgctggaaaagttcgttgaccgcgaccaggtgccgccggtctgcggtggtacaatgaagggctccgccttgtcgcacctcgaggagctgccgagcctaaacagcgagtag

SEQ ID NO: 7621 - protein, 244 aa, Leishmania major
MPTAKVTEKEAACVTALKGEYPASKADPADAGFLSDSTYLRFARAHDGNVKKASELLGATLRWRKQTKPYAITMEEVQNAMKQTTMYCGGRCNIGCPVIAMVPGMQNDCTVEERTKQLVYIMEETHRKGYERITWIIDFGAMGSHRDERSKEARKETMKILQDYYPERMARILLYRTPWYIRMLLGAAKMFMDARTAAKVYNAGRTIEALEKFVDRDQVPPVCGGTMKGSALSHLEELPSLNSE

SEQ ID NO: 7622 - DNA, 789 bp, Tetraodon nigroviridis
  CDS (1)..(789)
atgacagattcaactgaaaaatacgattccagagacgtggaaaggcttcagaatgatgacgctctggtggaaaactacctgacatggagactttatgttgtagatgatgccctaaaaatgattgatgaaagccttcaatggaggaaagagtttggcgttaatgatctcaccgagagtgtaattcccagatggatgttcgagactggtgccgtgttccttcatggctacgacaaagaaggcaacaagctcttctggttcaaagtaaagctacatgtcaaagaccccaaaacagtgttggacaagaagaagtatgttgccttctggctggagcggtatgcaaagaaggaacctggaatgcctcttactgttgtgtttgacatgacagagtctggcatcagcaatatagacatggattttgtgaggtacatcatcaactgcttcaaagtgtattaccccaagtttttatccaaaatgatcattgtggatatgccttggatcatgaatgctgcctggaagatcgtgaagtcatggttgggtcctgaggccatcagcaaactcaggtttgcctccaaatctgaggttcaagggttcataggaccggagtacctgccaccacacatgggtggaacggaccctttcacatacagctaccctcctcttcctgacgatgacttccaaatctgtgacaacggcccggtcgttagtgaggacgagacggagagcagagatgcggacgcagagagtaaagataccttgaattcgtccagcttcaactccgaggtgctgtaa

SEQ ID NO: 7623 - protein, 262 aa, Tetraodon nigroviridis
MTDSTEKYDSRDVERLQNDDALVENYLTWRLYVVDDALKMIDESLQWRKEFGVNDLTESVIPRWMFETGAVFLHGYDKEGNKLFWFKVKLHVKDPKTVLDKKKYVAFWLERYAKKEPGMPLTVVFDMTESGISNIDMDFVRYIINCFKVYYPKFLSKMIIVDMPWIMNAAWKIVKSWLGPEAISKLRFASKSEVQGFIGPEYLPPHMGGTDPFTYSYPPLPDDDFQICDNGPVVSEDETESRDADAESKDTLNSSSFNSEVL

SEQ ID NO: 7624 - DNA, 1206 bp, Theileria annulata
  CDS (1)..(1206)
atggatttcattaaaacgctaaagaagaagacggaagctaaaatcgccgacatcaaatcagattttagcaactcttctagccttccaaaatgcaaaccagatttcgattacaaatctttaaatatttctacagatataggacctcaaattacagaatacttttatgatatggactttgatttacgtgactatttgaaaaagtataatttgatttatccatgcactgagtcacaatctccatcatttgtagacctacagttcgattctcttaatactatgcggaaattattgctcgacatgcctgttgttgagacagttgccgaggctacaaagactaaaaagtccaaactacatagccaccagccagttaaggaagttacactagatgaactgtactattgtaacgatctggtactatttaggttccttagaacattcgactataaaccagaaaaatcattacacgcaattttaaaaacactctcatggagaagaactagagacccattgagaataaagcctgaagtagtacatccagtactatacaaaaatttattatacagaagaggatatgattattatgcatcacctattttatatttcagacctataaatgaaacagaagctagcttagaattacatgttttgggactttattatgttctggaaagagctttacaaacatgtttagtatcgcaagggaacgataaagtgtatgtaatagtagacttaaaagattggtcactgtcaagactaccacctatggaactagttatcgaaactgctagagcacttgtagatcactatacagagacgattgatgagattatatttattgacccaccgccattgatcgatccagtatatcagatggtcaagtgtgttatcccagcatcaacaacaaagaaacttcttttcaaatcaagaggaccaaaactattcgactacctaaggtcgagaatcccattatgctttctagagaaatcattgggaggagaatgtgagcctgagatggatttcaaagattactggaaggttgaggaagcggaattcacatattttcaaagaagaatggacgataaacataaaaataatattttaacacctgtacaattcccaatatatagaactcgacttataaaatattattgtggcatccaattgttaattcgttatgttattttattttatttatgtatatattaa

SEQ ID NO: 7625 - protein, 401 aa, Theileria annulata
MDFIKTLKKKTEAKIADIKSDFSNSSSLPKCKPDFDYKSLNISTDIGPQITEYFYDMDFDLRDYLKKYNLIYPCTESQSPSFVDLQFDSLNTMRKLLLDMPVVETVAEATKTKKSKLHSHQPVKEVTLDELYYCNDLVLFRFLRTFDYKPEKSLHAILKTLSWRRTRDPLRIKPEVVHPVLYKNLLYRRGYDYYASPILYFRPINETEASLELHVLGLYYVLERALQTCLVSQGNDKVYVIVDLKDWSLSRLPPMELVIETARALVDHYTETIDEIIFIDPPPLIDPVYQMVKCVIPASTTKKLLFKSRGPKLFDYLRSRIPLCFLEKSLGGECEPEMDFKDYWKVEEAEFTYFQRRMDDKHKNNILTPVQFPIYRTRLIKYYCGIQLLIRYVILFYLCIY

SEQ ID NO: 7626 - DNA, 801 bp, Oryza sativa
  CDS (1)..(801)
atgaggattgagctttgtcaagagcagaagaagtcatgtttagctttaggaaaaagcatgcctctcgcttcgattcagatgacattgagcaacaagaagcaaagatccaagagctcagagctgcacttgggccgttgtcttcctctgcccgagatttctgttgaatcagaaacaggtaaaatgtacagagcaagttttgtagatagagaggggagaactgtcgtcattatgagacccgcaaagcagaacacatcgtcccatgaagggcaggtacggtttcttgtatatacgttggagaatgcaatcctcagcttgcctgaagatcaagagaaaatggtttggttgatagatttcacaggatggaccttggcaaatgcgacacccataaagactgccagagaatgtgcaaatatcctgcaaaatcattaccctgagaggttggctatcgggatcctgtttaatccccccaaagtatttgaggctttttggaaggttgtcaaacatttccttgacccaaaatcaatccagaaggtgaattttgtatacctgaagaacgaggagagcatgaagatcctgcacaagtacattgatccagaagtccttcctgtagagtttggaggaaagaacaatgtggtgtacagccatgaggagtactccaagttgatggtgaaagatgacattaaaatggcaagcttttgggcatcggatacaaaaactgaccatgttaacaaagtcattaacgagcactccgtccccgaggttacgcaacagtcgtcgctggtggctgcgaaagcgagctga

SEQ ID NO: 7627 - protein, 266 aa, Oryza sativa
MRIELCQEQKKSCLALGKSMPLASIQMTLSNKKQRSKSSELHLGRCLPLPEISVESETGKMYRASFVDREGRTVVIMRPAKQNTSSHEGQVRFLVYTLENAILSLPEDQEKMVWLIDFTGWTLANATPIKTARECANILQNHYPERLAIGILFNPPKVFEAFWKVVKHFLDPKSIQKVNFVYLKNEESMKILHKYIDPEVLPVEFGGKNNVVYSHEEYSKLMVKDDIKMASFWASDTKTDHVNKVINEHSVPEVTQQSSLVAAKAS

SEQ ID NO: 7628 - DNA, 1332 bp, Cryptococcus neoformans var
  CDS (1)..(1332)
atgagcagcgataaattcatcagcaatcttttctctctgtctctctttgacaccccgcccaccgccatgtccttcttcaagtcaagatctgcctcggcgtccaccgcctccctcaagccagagtccttgggcccaaagaccagtgaggtcttcaccgtgcccccgcaagaatcgagcgtgaagaaaaggtgggagtatgatgatcatcaactcggcctcatcgcgcaactcaaagagtacaccaaaactatcgccctcccagagtctgacgagtactacccttgggagcagcgtttcctttctgatcctgctacccatgcccgatacatgcgcgccgctaaatggaagctccatgacggcaagcacaggatcaggggaacgatggaatggaggagggagtataagccagaactgatacagcccgatgatgttggtgttgaggccgagactggtaagattatccttacaggcttcgatatggatgcccgaccaatcctctacatgcgacccggtagggaaaacaccgagacgagcccgaggcaaattaggcatcttatctatcatcttgaacgagcaatcgacttgatgcctcctggtcaagaacaagtcgccatcatcgtcgactacaaatctgctacatcccaatccaatccttccattggtacagcccgcaaggtgctccacattctccagaatcattatgttgaacgacttgggaggggtttggtcgtcaacatgccatggtggatcaacgcctttttctccggtatctcccccttcatggaccccatcacccgcgacaagatccgattcaacccccgtctactcgacctcgtccccgccgcgcacctcgactcagagtttggtggggactataatttcacatatgattattccgtttactggaagacgattaccgagttttgtcatattgctccgaacgggaggcgggtgcctcctccgggcaaggaggaggaggggaaggggagggaagggtggatcccgcctgcggggaatgggataaaagctgcggtggaggggtacgtgccgaaagaggggaccgtgaagagcggagaaatcgtcaaggctggcgaaaagaatgaaaagtcagagaagacggggaagggtgctgccgctacaagtgcaaatggcgtcgccggtgccgctcctaccgcttcctccaccacctcccccgccccaccagaaaaagaaatggaatccctagccatccaaacagcccctggcgaaccaatcggcgggtccgtgtttgatcatccgcctagtgagggtgaagtgcatgaggcgaagcagagtttgaatgtttctgcgtaa

SEQ ID NO: 7629 - protein, 443 aa, Cryptococcus neoformans var
MSSDKFISNLFSLSLFDTPPTAMSFFKSRSASASTASLKPESLGPKTSEVFTVPPQESSVKKRWEYDDHQLGLIAQLKEYTKTIALPESDEYYPWEQRFLSDPATHARYMRAAKWKLHDGKHRIRGTMEWRREYKPELIQPDDVGVEAETGKIILTGFDMDARPILYMRPGRENTETSPRQIRHLIYHLERAIDLMPPGQEQVAIIVDYKSATSQSNPSIGTARKVLHILQNHYVERLGRGLVVNMPWWINAFFSGISPFMDPITRDKIRFNPRLLDLVPAAHLDSEFGGDYNFTYDYSVYWKTITEFCHIAPNGRRVPPPGKEEEGKGREGWIPPAGNGIKAAVEGYVPKEGTVKSGEIVKAGEKNEKSEKTGKGAAATSANGVAGAAPTASSTTSPAPPEKEMESLAIQTAPGEPIGGSVFDHPPSEGEVHEAKQSLNVSA

SEQ ID NO: 7630 - DNA, 1681 bp, Schistosoma japonicum
  CDS (199)..(1263)
atctttgaacttattcatttttttcttttactttattttatacactaatgtggaatatccgttgattgtttaaactgattcaatatactcaatagacaatcagttgcatcacatttgatataaacaaactttactgaaacttctaaatatttcattcagtaatcatagtaaacacacaaatatacatcaacattatctatggcatctttagtcaatgttaaaggactagttcaacaaatgacaaaacttcttcaagatttaaaaactagtccagaaatggagaaagtgattgataatgaagaaaatatcataagattccttaaagcacgtaattgggatttacaatctgcggagaaaatgatccgtaaagacttacagtggcgtcaggaatttagacctgatttaatagactgtaaaaattgccacagtcagccagggacacacagtttaagacaaattggatttgatgatgctggccgtccagttatatatgcatcattttgtcaagctatttcaagtaaaaatatgtcaaatgatgcaataactcatttgatatatacaattgaaaacgcaatcaaaagtatgaaatcaggagttacacagtgggttttcgtaattgattgcacaggaatgactacagccaattgtcaacctcgtcttggttatgaatgtgctaaaataatggctgatcattatccagagcgtcttggtttagccatgtgtgtacatccaggaccagcattcaaagttgcttggcaagctatcaaaccatttttaccacagacaacagtagcgaaagtctgcctcatcaaaagtaaatcgaaactgcattcaacatttgaacaatacttccctccagaaatgtgtaattggttattgacggaagtaaaattcaaccgaactagtcatgcatcgagcacataccgtccattttggttacctccaaaagatgctgatgataaacatgatcctagaggtgatccggtttatgttcgtgattggcttgtattaaataatccttctcaacatttaccgcatccaaatattgttgactacatgcttggatgtttgaattcacttaattatgataataaattgaaccctaattcatcggttaataataactatgaatcaacagaaatggagtttggagattttgacgaacaagaaaatgatgctgatgatgaagaaattactagaaaactagcagcggaattacctaaagaatataggattcctgaaaatgcggaaaagttgacgtaaaattaaatattttagtacattggaatattcatgagttcgtatttgttagcgcattttccttcacttggcattcgtgtcattttatgccactggaatatgcaaaatatgtaaactaatcagagatataatatactcagggttatacgaagtaatgttttgctaatacaatatcctaattgcgtatattttctttattcttaagatttatttaatttacaaatgaacttgccatttttgtatgattccgtaaaaacctcaacaaatgtaacaaatacttcaattgagtcaacagtaaattactctttaacaagggtgattagtcaaatgtattcacaattttgaaatgtcttcactaagagggttgttgctgagtagaacaaatatgacaatattcaaatttgtaaatggaataaattac

SEQ ID NO: 7631 - protein, 354 aa, Schistosoma japonicum
MASLVNVKGLVQQMTKLLQDLKTSPEMEKVIDNEENIIRFLKARNWDLQSAEKMIRKDLQWRQEFRPDLIDCKNCHSQPGTHSLRQIGFDDAGRPVIYASFCQAISSKNMSNDAITHLIYTIENAIKSMKSGVTQWVFVIDCTGMTTANCQPRLGYECAKIMADHYPERLGLAMCVHPGPAFKVAWQAIKPFLPQTTVAKVCLIKSKSKLHSTFEQYFPPEMCNWLLTEVKFNRTSHASSTYRPFWLPPKDADDKHDPRGDPVYVRDWLVLNNPSQHLPHPNIVDYMLGCLNSLNYDNKLNPNSSVNNNYESTEMEFGDFDEQENDADDEEITRKLAAELPKEYRIPENAEKLT

SEQ ID NO: 7632 - DNA, 1530 bp, Xenopus laevis
  CDS (1)..(1530)
atggctgaggacaaggagcagcaaattcaagagacaagaaaaaggtttactcaggagtatctgcaagataaggctgacaagtatgattctcgtgatgtggacagactacagaccgacgacgccttggtggaaaactacctgatgtggaggcactatgtaacggaggatgctctgaagatgatagatgaaagcctgaaatggaggaaagaaattggtgtgaatgacttgagtgaatccactattcctaagtggtgttttgagactggagcaacttatctgcatggatacgacaaagaaggaaataaattgttgtggctcagggtaaagctccatgtacgtgatggtaaaacaaatgaggacaagaaaaagtttgtggcattttggttggagcgctatgccaggagagaaccaggaaagctgctaactgttgtttttgacatgcttgactctggattaagcaatatagatatggattttgttcggtttgttatcaactcttttaagacctactaccccagatatctgtctaagatggtagtctttgaaatgccatggatattgaatgctgccttcaaaattgtgaaaagttggcttggtccagaggctataaatgtgctgaaatttgtgaataagaatcaagttcaggactacatcagcattgaatacttgccaccacacatgggaggaactgatcccttcaagtacagttatcctccattacccgacgatgactttcaaacgccgttgtgtgagaatggtccaatagcaagtgaagacgattctgaaagcaaactgagcgaatcagatctccgtgactcagtcgattcaattgtgccaaaaaagatgagcatcaatgaagaccaaattaaacaggaggatttagacaaaaatgatataaagcaaaaaaacaaccggaaggcatcaacagtttttaaagggcctttcttgcatatcagtccagcagaagagctgcattttgggtccaaggaaagtggggagcgaaaatgtatcatcgtgctgagtaatgtaacaaaaaacacagtggcatttaaggtgaggacaactgctcctgaaaaatacagagtcaaaccaagtaacagtagttgtgaaccaggatcgacggttgatattgttgtgtctctgcacgcagcctttgtagcctctcttcaggacagattcttagtaatggcggccgaaatggaacagccctccagtgccagcacacaagaacttgcacagttttggaaggagctgcccaggagtaaagttatggagcataggttaagatgccatgttattgaaaatagcaagccatcgtcattaatcctgaaatcaaacaccttaaaccacactatatcagacagtgacgatttgcattttaagctgaatcagctgttggaaacgaacagaagattagaagcacggattggacgctgtatctggtttcagcatatgttagccgccttattatccattctggttgccattgttgctgcaggagtgtataagatgaaacaccaggactgttaa

SEQ ID NO: 7633 - protein, 509 aa, Xenopus laevis
MAEDKEQQIQETRKRFTQEYLQDKADKYDSRDVDRLQTDDALVENYLMWRHYVTEDALKMIDESLKWRKEIGVNDLSESTIPKWCFETGATYLHGYDKEGNKLLWLRVKLHVRDGKTNEDKKKFVAFWLERYARREPGKLLTVVFDMLDSGLSNIDMDFVRFVINSFKTYYPRYLSKMVVFEMPWILNAAFKIVKSWLGPEAINVLKFVNKNQVQDYISIEYLPPHMGGTDPFKYSYPPLPDDDFQTPLCENGPIASEDDSESKLSESDLRDSVDSIVPKKMSINEDQIKQEDLDKNDIKQKNNRKASTVFKGPFLHISPAEELHFGSKESGERKCIIVLSNVTKNTVAFKVRTTAPEKYRVKPSNSSCEPGSTVDIVVSLHAAFVASLQDRFLVMAAEMEQPSSASTQELAQFWKELPRSKVMEHRLRCHVIENSKPSSLILKSNTLNHTISDSDDLHFKLNQLLETNRRLEARIGRCIWFQHMLAALLSILVAIVAAGVYKMKHQDC

SEQ ID NO: 7634 - DNA, 936 bp, Oryza sativa
  CDS (1)..(936)
atgtcctttctattcaagtcaagcaatggtgctacaacagagaaaaacttgaccctagaagagcagcaggagaagataaatgacttgcgtaaggagcttggtgaacactcatcagaagaaatacaagatttcctttcagatgcctcgtgcctgagatttcttcgagcaagaaactggaacgtgcagaaagcaagtaaaatgatgaagtcagctgtaaagtggcgggtgtcatatatgccacaaaagattaactgggatgatgttgcacatgaagcagagacaggaaagatatatagggctgactacaaggacaaacatggaagaactgttcttgtcctgaggccaggcttagagaacactacttcaggaaagggacagatcaaatatcttgtttactgtctggagaaagcaattatgagcctgacggaagatcaagagaagatggtctggctgacagacttccagagttggacattggggagcacaccgctgaaagtgacccgagagactgtgaacgtcttgcaagactgttaccctgagaggcttgggttagcaatcctttacaatcctcctaggatatttgagtccttctggaagatagtgaagccatttttggaccatgagacctacaagaaggtgaaatttgtgtactccagcgataaagagagccagaagataatggctgacgtctttgacttggacaagctcgactcagcattcggaggaaggaatccagctaccttcgaatacaatagctatgctgagcgtatgagagccgatgacattaagatgggttcttcattcaaatcaaacggcatcaccctgcctcaggaccattcacatgtatccgctgacaaggaggctaatggtggcggttcggacgcctcaagtgaggcctccttctatagtggaactgattcccctcttcgtgcttag

SEQ ID NO: 7635 - protein, 311 aa, Oryza sativa
MSFLFKSSNGATTEKNLTLEEQQEKINDLRKELGEHSSEEIQDFLSDASCLRFLRARNWNVQKASKMMKSAVKWRVSYMPQKINWDDVAHEAETGKIYRADYKDKHGRTVLVLRPGLENTTSGKGQIKYLVYCLEKAIMSLTEDQEKMVWLTDFQSWTLGSTPLKVTRETVNVLQDCYPERLGLAILYNPPRIFESFWKIVKPFLDHETYKKVKFVYSSDKESQKIMADVFDLDKLDSAFGGRNPATFEYNSYAERMRADDIKMGSSFKSNGITLPQDHSHVSADKEANGGGSDASSEASFYSGTDSPLRA

SEQ ID NO: 7636 - DNA, 1308 bp, Oryza sativa
  CDS (1)..(1308)
atgtctccgaccgccaccccatcccccgcgcccgccgcggtggcggcagcgcccaagccgccgccgtcggggacgggggcgaagcgcagcctgatgtcgtcgctgatggaggccaccgcgctgctcaggtcgtcgtcgttcaaggaggactcgtacgtggcgtccgcgctcccggcgtccgacctccgcgcgctcgccgacctcagggcgctgctgtccacgcacccggacccaatctccatctggggcgtgccgctcaacccggcgccgccccagggcggggagggggccccggccccggccgccgccgccgacgagcgcgccgacgtcgtgctgctcaagttcctccgcgcgcgggacttccgcgtccgcgacgcgcacgccatgctgctccgctgcgccgcgtggcgggccgagttccgcgccgacgccgtgctggacgaggacctcgggttcaaggacctggagggggtcgtcgcctacatgcacggctgggaccgggagggccacccggtctgctacaacgcctacggcgtcttcaaggacagggacatgtacgaccgcgtcttcggcgacggcgagcgcctcgcccgcttcctccgctggcgcgtccaggtcatggagcgcggcgtccgcgcgctccacctccgccccggcggcgtcaacgccatcatccaggtcaccgacctcaaggacatgcccaagcgcgagctccgcgccgcgtccaaccagatcctctccctcttccaggacaactaccctgagatggtcgcgcgcaaggtgttcatcaacgtgccctggtacttctcggtgctgttctccatgatctcgccgttcctcacggagcgcaccaagagcaagttcgtcatcgcgcgcgagggcaacgtcgccgagacgctcttcaagttcatccggccggagctggtgccggtgcagtacggcgggctgagccgcgccggcgacctggagaacggcccgccgaagccggcgtccgagttcaccatcaagggcggcgagaaggtcttcctagagatcgacggcatcgaggccggcgcgacgataacgtgggacctggtggtgggcgggtgggagctggagtacggcgcggagtacgtgccggcggcggaggacagctacacgctgtgcgtggagcggacgaggaaggtgccggccgccgccgacgagccggtgcacaacgccttcacggcgagggaggccggcaagatggtgctctccatcgacaactccggctcccggaagcggaaggtcgccgcctaccggtacttcgtgcgcaagccgtcggcgtag

SEQ ID NO: 7637 - protein, 435 aa, Oryza sativa
MSPTATPSPAPAAVAAAPKPPPSGTGAKRSLMSSLMEATALLRSSSFKEDSYVASALPASDLRALADLRALLSTHPDPISIWGVPLNPAPPQGGEGAPAPAAAADERADVVLLKFLRARDFRVRDAHAMLLRCAAWRAEFRADAVLDEDLGFKDLEGVVAYMHGWDREGHPVCYNAYGVFKDRDMYDRVFGDGERLARFLRWRVQVMERGVRALHLRPGGVNAIIQVTDLKDMPKRELRAASNQILSLFQDNYPEMVARKVFINVPWYFSVLFSMISPFLTERTKSKFVIAREGNVAETLFKFIRPELVPVQYGGLSRAGDLENGPPKPASEFTIKGGEKVFLEIDGIEAGATITWDLVVGGWELEYGAEYVPAAEDSYTLCVERTRKVPAAADEPVHNAFTAREAGKMVLSIDNSGSRKRKVAAYRYFVRKPSA

SEQ ID NO: 7638 - DNA, 852 bp, Oryza sativa
  CDS (1)..(852)
atgagtaatctgctcaaggctaagagctgggtaccagaggagaaagctgcagcgactgcttctgatgaacagaatgacaagataaagaaagtccgggaactcctgggaagccagatgacagcagagatgccgtcattcttgtcggacgccaccatccgccgcttcctccgggcaaggaactggagcacggagcaagcaaccaaggctctcaaagagactgtcaaatggaggcgtcagtacaggccggacacaatccgctgggaagacattcctggaagggagcacgaagctaggagaacatatatagccgactactttgataagaatggaaggatcgtcttcatatcgaatccgacaattaagagtaaatcatccaccaaggaccagataaaacagttagtgtataacctggagatttttgccatgcactcagaaaacatggaagacgaatgtactgtttggttaactgactttcaaggctgggtgctaacaaatacgccattgccgttgcttcgtgaatgcactcacataattcaaaaccattatccagggctgatttctgtcgcaatcctcagcaacccaccaaggattttcgaatccttttggaagattgtgtgctatttcattgagccaaagttgaaagaaaaagtgaagttcgtatatactaacaatccagagagccacaagatagttgctgatatgtttgatttggacaagctggagtctgcatttggggggaggaacacacttccatttgacatggacaagtatgcagagagaatgaaacgaagtgaccaaatgagaggagctcccatgcatgccaatggctactcttgctctacccaaacctga

SEQ ID NO: 7639 - protein, 283 aa, Oryza sativa
MSNLLKAKSWVPEEKAAATASDEQNDKIKKVRELLGSQMTAEMPSFLSDATIRRFLRARNWSTEQATKALKETVKWRRQYRPDTIRWEDIPGREHEARRTYIADYFDKNGRIVFISNPTIKSKSSTKDQIKQLVYNLEIFAMHSENMEDECTVWLTDFQGWVLTNTPLPLLRECTHIIQNHYPGLISVAILSNPPRIFESFWKIVCYFIEPKLKEKVKFVYTNNPESHKIVADMFDLDKLESAFGGRNTLPFDMDKYAERMKRSDQMRGAPMHANGYSCSTQT

SEQ ID NO: 7640 - DNA, 993 bp, Xenopus laevis
  CDS (1)..(993)
atggctgaggacaaggagcatctaattcaggagacaagaaaaaggtttactcaggagtatttgcaagataaggctgacaaatatgattctcgtgatgtggacagactacagaatgatgatgccttggtggaaagctaccttgtgtggaggcactatgtaacagaagatgctctgaagatgatcgatgaaagcttgaaatggaggaaagatattggtgtaaatgacttgaacgaatccactattcctaagtggtgttttgagaatggagcaacttatctgcatggatatgacaaagaaggcaataaattgttgtggctcaaggtaaagctccatgtacgtgacggtaagacaaatgacgacaagaaaaagtttgtggcattttggctggaacgctatgccaggagagaaccagggaagctgctaactgtcgtttttgacatgcttgattgtggactaagcaatgtagatatggattttgttcggtttatcatcaactcttttaagacctactaccccagatatctgtctaagattgtagtctatgaaatgccatggatattgaatgctgccttcaaaattgtgaaaagttggcttggtccagaggctataaatttgctaaaatttgtgaacaagagtcaagttcaggactacatcagtgctgaatacttgccacctctcatgggaggaactgatcccttcaagtacagttatcctccattgccagacgatgactttcaaacgcccttatgtgagaatggaccaataacaagtgagaatggaccaataacaagtgagaatggaccaataacaagtgagaatggaccaataacaagtgaggatgattctgaaagcaaactgagcgaatcagatctccgtgactcagtcgattccagtgtgccaaaaaagctaacgactgctttgtctgatggtctggccgaagaggaactgaatataacaccacagttggaagtttgtcacatgagtgacatctga

SEQ ID NO: 7641 - protein, 330 aa, Xenopus laevis
MAEDKEHLIQETRKRFTQEYLQDKADKYDSRDVDRLQNDDALVESYLVWRHYVTEDALKMIDESLKWRKDIGVNDLNESTIPKWCFENGATYLHGYDKEGNKLLWLKVKLHVRDGKTNDDKKKFVAFWLERYARREPGKLLTVVFDMLDCGLSNVDMDFVRFIINSFKTYYPRYLSKIVVYEMPWILNAAFKIVKSWLGPEAINLLKFVNKSQVQDYISAEYLPPLMGGTDPFKYSYPPLPDDDFQTPLCENGPITSENGPITSENGPITSENGPITSEDDSESKLSESDLRDSVDSSVPKKLTTALSDGLAEEELNITPQLEVCHMSDI

SEQ ID NO: 7642 - DNA, 1227 bp, Saccharomyces cerevisiae
  CDS (1)..(1227)
atgtcctttgatagacacttgaccgaagaccaggaggtcgtccttaagcaaatttggacacaccttttccatctgtggcaagttcccgtggatggaactcatattttccctaataactccctccactcctcgtccacccctgctaagaagaagaaatcatcctggtttagcaagcttcagtcctcagaccatacacaggactccagcgaagccgctgaagcggcacacctctatgaaaagggcaagatacacaaggcactagccaatctagacccgcaaacgaccaagaagcagttctggcacgatatcaagaatgaaactccagacgccaccattttgaagtttatcagagccagaaagtggaacgcagacaagaccatcgccatgttgggtcacgatttgtactggcgcaaggacactattaacaagatcataaacggtggcgaaagagctgtgtatgagaataacgagaccggtgtcattaagaacctggaattgcaaaaggccaccatccagggttacgacaatgacatgaggccagtcatccttgtgagacctagattacatcattcttccgaccaaactgaacaggagctggaaaaattctccctgttggtcatcgagcaatcaaagcttttcttcaaagaaaactaccccgcatccaccaccatcttgttcgatctgaacgggttctccatgtccaatatggactatgcccccgtcaagtttctaatcacttgttttgaggctcactacccggaatctttgggccatctacttatccataaggccccttggatctttaacccgatttggaacatcatcaagaattggctggatccggtcgtcgcgtccaagattgttttcactaagaatatcgacgaattgcacaagtttatccaaccccaatacatccctaggtatctgggcggagaaaatgacaatgatttggatcattacactccaccagatggctctttggacgtccatctgaaagacaccgagactcgcgctatgatcgaaaaggagagagaagaattggtcgaacaattcttgactgtcactgcccaatggattgaacaccagccattgaacgatccagcatacattcaactgcaggagaaaagagtacaactttccaccgctctttgtgaaaactactccaagttagatccgtacatcagatcaagatccgtttatgactacaatggttctctaaaagtttga

SEQ ID NO: 7643 - protein, 408 aa, Saccharomyces cerevisiae
MSFDRHLTEDQEVVLKQIWTHLFHLWQVPVDGTHIFPNNSLHSSSTPAKKKKSSWFSKLQSSDHTQDSSEAAEAAHLYEKGKIHKALANLDPQTTKKQFWHDIKNETPDATILKFIRARKWNADKTIAMLGHDLYWRKDTINKIINGGERAVYENNETGVIKNLELQKATIQGYDNDMRPVILVRPRLHHSSDQTEQELEKFSLLVIEQSKLFFKENYPASTTILFDLNGFSMSNMDYAPVKFLITCFEAHYPESLGHLLIHKAPWIFNPIWNIIKNWLDPVVASKIVFTKNIDELHKFIQPQYIPRYLGGENDNDLDHYTPPDGSLDVHLKDTETRAMIEKEREELVEQFLTVTAQWIEHQPLNDPAYIQLQEKRVQLSTALCENYSKLDPYIRSRSVYDYNGSLKV

SEQ ID NO: 7644 - DNA, 702 bp, Hevea brasiliensis
  CDS (1)..(702)
atgttaacagggacacttaagtggagggcaacttataagcctgaagaaatccgctggcatgaaatatcacatgaagttgaaaaaggaaaagtcttcagagcaaattttcatgaccgatatgggaggactgtgcttataatgaggccagagatgcagaacacaacatctgcagtagacaatatccgtcatttggcctatgttattgaaaatagcatccttaacctagctgagggtcaagaacaaatgtcttggttgatagacttcactggattatccttgagcaacagtatgtctattggaacaggtgttgatatcattaaaattttacagaatcactaccctgaaaggcttgctgtagcatttgtctataatcctccaagaatttttgaggcattctggaaggctgttaagtgcgtacttaattcaaaaacttcagagaaggtaaaatttgtttatccaaataataaagagagtgaggaggtcatgaggcatttctttgatgttgacaaccttcctggtgagtttggagggaaagccacgatgaagtatgaccatgaggaattctcacgattgatggcccaggatgatgtaaaaactgccaaatattggggatttgatgagaagccaacccacattgctaatgcccaattgaggcctcagttggccccagagccaacgccttttgcaccacctgctagttaa

SEQ ID NO: 7645 - protein, 233 aa, Hevea brasiliensis
MLTGTLKWRATYKPEEIRWHEISHEVEKGKVFRANFHDRYGRTVLIMRPEMQNTTSAVDNIRHLAYVIENSILNLAEGQEQMSWLIDFTGLSLSNSMSIGTGVDIIKILQNHYPERLAVAFVYNPPRIFEAFWKAVKCVLNSKTSEKVKFVYPNNKESEEVMRHFFDVDNLPGEFGGKATMKYDHEEFSRLMAQDDVKTAKYWGFDEKPTHIANAQLRPQLAPEPTPFAPPAS

SEQ ID NO: 7646 - DNA, 861 bp, Melampsora lini
  CDS (1)..(861)
atggatgacgctactttacttcgctttctccgagcaaggaaatttgatctcgagaaaagtaaattaatgttcacggactgtgagaaatggcgtaaagaattcaaagtcgatgagctctatgcgacttttgaatatccagaaaagaaagaggttgacgcgatctaccctcagttttatcacaaaactgagaaggatggtcgaccgatctatatcgagcaacttggaaaactcgatttgactaagttatacaaagtcactactcccgaacgacaactacaacgtctagtggttgaatacgaaaaatttctccgtgatcggttaccagtttgttctgtacaacaaggcaagttagttgaaacttcttgtactatcatggatttgagtggagtaggtcttagtcaattctggaaggtcaagaattacgttcaacaagcatctcatctaagtcaaaattactatccagagacaatgggcaagttttacatcatcaatgcgccttacctcttctcaaccgtttggtcccttgtcaaaccttggttagatgaagtcaccgtcaagaagattagcattcttgattcgagttaccataagactctcttggaacaaattccagctgaatccttaccgaaatcattgaaaggaacttgtgattgtcctggtggatgtagtatgagtgatgcaggaccttggaaggacgaagagactgtggctaaagctaagaagttgaaagctggtgaacctgcaaaggaggaagctattcctgaagtggctgctacggagagcgaaaagaaaccagaggaggctgctgcaactgaggcccctgcaactgaggctgcgcccgctgagactacgactacctaa

SEQ ID NO: 7647 - protein, 286 aa, Melampsora lini
MDDATLLRFLRARKFDLEKSKLMFTDCEKWRKEFKVDELYATFEYPEKKEVDAIYPQFYHKTEKDGRPIYIEQLGKLDLTKLYKVTTPERQLQRLVVEYEKFLRDRLPVCSVQQGKLVETSCTIMDLSGVGLSQFWKVKNYVQQASHLSQNYYPETMGKFYIINAPYLFSTVWSLVKPWLDEVTVKKISILDSSYHKTLLEQIPAESLPKSLKGTCDCPGGCSMSDAGPWKDEETVAKAKKLKAGEPAKEEAIPEVAATESEKKPEEAAATEAPATEAAPAETTTT

SEQ ID NO: 7648 - DNA, 861 bp, Melampsora lini
  CDS (1)..(861)
atggatgacgctactttacttcgctttctccgagcaaggaaatttgatctcgagaaaagtaaattaatgttcacggactgtgacaaatggcgtaaagaattcaaagtcgatgagctctatgcgacttttgaatatccagaaaagaaagaggttgacgcgatctaccctcagttttatcacaaaactgagaaggatggtcgaccgatctatatcgagcaacttggaaaactcgatttgactaagttatacaaagtcactactcccgaacgacaactacaacgtctagtggttgaatacgaaaaatttctccgtgatcggttaccagtttgttctgtacaacaaggcaagttagttgaaacttcttgtactatcatggatttgagtggagtaggtcttagtcaattctggaaggtcaagaattacgttcaacaagcatctcatctaagtcaaaattactatccagagacaatgggcaagttttacatcatcaatgcgccttacctcttctcaaccgtttggtcccttgtcaaaccttggttagatgaagtcaccgtcaagaagattagcattcttgattcgagttaccataagactctcttggaacaaattccagctgaatccttaccgaaatcattgaaaggaacttgtgattgtcctggtggatgtagtatgagtgatgcaggaccttggaaggacgaagagactgtggctaaagctaagaagttgaaagctggtgaacctgcaaaggaggaagctattcctgaggtggctgctacggagagcgaaaagaaaccagaggaggctgctgcaactgaggcccctgcaactgaggctgcgcccgctgagactacgactacctaa

SEQ ID NO: 7649 - protein, 286 aa, Melampsora lini
MDDATLLRFLRARKFDLEKSKLMFTDCDKWRKEFKVDELYATFEYPEKKEVDAIYPQFYHKTEKDGRPIYIEQLGKLDLTKLYKVTTPERQLQRLVVEYEKFLRDRLPVCSVQQGKLVETSCTIMDLSGVGLSQFWKVKNYVQQASHLSQNYYPETMGKFYIINAPYLFSTVWSLVKPWLDEVTVKKISILDSSYHKTLLEQIPAESLPKSLKGTCDCPGGCSMSDAGPWKDEETVAKAKKLKAGEPAKEEAIPEVAATESEKKPEEAAATEAPATEAAPAETTTT

SEQ ID NO: 7650 - DNA, 723 bp, Triticum monococcum
  CDS (1)..(723)
atgcactacgtggcccgccggaggtgcgccacgcggcgccaccggtccgacggaggagacgagcttcagaccaccgggtttaagggtgtttccggctgggaccccttcgaggaggacaacttgacgctacggcggttcttgcgcacaagaggccacaacatcggcaaggcgtcggcgatgctcctcaagtaccttgcctggaagcgggccgtcaagccgcgtggcttcatctccgacgacgaggtgcacaaccagctcgcgcaagagaaggtctacacgcagggcttcgacaagatgggtcgccccatggtgtacctctttgccgcccggcatttccctcggcgtgacttcgacgagctcaagcgctacgtcgtctaccaagaaaagtttgcggcggtggtggacttgaaggggtggggttacgtgaactgtgacatcaaggcaagcgtggcggggctagacatcataaagaactactacccggagcagttggggcaggtgttcctggtccacgtacccttcgtgttcatggcggcatggaagcttgggtgcacgtttgtcgataacaacaccaagaagaagtttgtgttcatcgatgatagggacctcagtggcacactccgagacgttgtcgatgagtcccagctccccgatgtgtacggagggaagttcaagctgcaaggctacaaccattcttcaccaccttcgtcgacatgcaactga

SEQ ID NO: 7651 - protein, 240 aa, Triticum monococcum
MHYVARRRCATRRHRSDGGDELQTTGFKGVSGWDPFEEDNLTLRRFLRTRGHNIGKASAMLLKYLAWKRAVKPRGFISDDEVHNQLAQEKVYTQGFDKMGRPMVYLFAARHFPRRDFDELKRYVVYQEKFAAVVDLKGWGYVNCDIKASVAGLDIIKNYYPEQLGQVFLVHVPFVFMAAWKLGCTFVDNNTKKKFVFIDDRDLSGTLRDVVDESQLPDVYGGKFKLQGYNHSSPPSSTCN

SEQ ID NO: 7652 - DNA, 1095 bp, Ajellomyces capsulata
  CDS (1)..(1095)
atgacaacgcccgccgtcccctcccaccctctcaccctcgatcccaagtacgacgactacgatttcccaaccaccgcccctgacgctcaatcaggccacccaggccacacaaccccggagcaggatgcgcgggtttaccagctgcggatcatgctggagcagctcgactacacggagcggttggataccctgacgctgctgaggttcctgcgcgcgaggaagtttgacgttgaggcggcgaaggcgatgtttgtcgagtgcgagaaatggcggcaagagttcggtacggatgatctggtgaatacgttcgagtacccggagaaaccgcaggtgttcgagtactatccacaatactatcacaagacggataaagatggccgtcccgtctacatcgaaaaactgggcaaaatcgacctaaacgccatgtacaaaataaccacagcggatcgcatgctgaaaaacctagtctgcgaatacgagaaactcgccgacccgcgcctgcccgcctgctcgcgcaaggccggcaagctactcgaaacctgctgctcgatcatggacctgaagggcgtgggcatcacccgcgtcccctctgtctacggctacgtcaaacaggcctccgccatttcgcagaactactatccggagcgtctgggcaagctgtacctcatcaacgcgccgtgggggttctccagcgtcttcagcgtcgtcaagggcttcttggaccccgttaccgtgcagaagatccatgtgctgggcagcgggtatgaggccgagctgctggcgcaagtccccaaggagaacctgccgaaagagtttggcggcgagtgtgagtgtgagaatggctgtgagtttagcggcatgggtccctggcaggagaaggagtgggcgaaggagcccaagtgggttacgaaggcacctgacgatacggcgaaagaggaagctgataaggagaataaggggaagaaggggagtgagggacaggaaaggcagaaggaggcggcggaggcggcggagacagcagtgatgcagaaagaaacagagaaaaatgaggcggacactgtcaagcagaagattaatggggaggtgacggcgtaa

SEQ ID NO: 7653 - protein, 364 aa, Ajellomyces capsulata
MTTPAVPSHPLTLDPKYDDYDFPTTAPDAQSGHPGHTTPEQDARVYQLRIMLEQLDYTERLDTLTLLRFLRARKFDVEAAKAMFVECEKWRQEFGTDDLVNTFEYPEKPQVFEYYPQYYHKTDKDGRPVYIEKLGKIDLNAMYKITTADRMLKNLVCEYEKLADPRLPACSRKAGKLLETCCSIMDLKGVGITRVPSVYGYVKQASAISQNYYPERLGKLYLINAPWGFSSVFSVVKGFLDPVTVQKIHVLGSGYEAELLAQVPKENLPKEFGGECECENGCEFSGMGPWQEKEWAKEPKWVTKAPDDTAKEEADKENKGKKGSEGQERQKEAAEAAETAVMQKETEKNEADTVKQKINGEVTA

SEQ ID NO: 7654 - DNA, 885 bp, Arabidopsis thaliana
  CDS (1)..(885)
atgttcagaagaaggaatgctcaccaactcgacaatgatgattctcaacaagataacaaggttagagaattgaaatccgcgataggaccattatcgggacatagtttagttttctgctctgatgcttccttgaggagatttctagatgctcgtaattgggatgtggaaaaagccaagaaaatgatccaagagactcttaaatggagatcaacttataaacctcaagagatccgttggaatcaagtagcacatgaaggtgagaccggaaaagcttcaagagctagttttcatgatcgacaaggtagagtagtgcttataatgagaccagccatgcagaactcaacatcacaagaaggtaatatcaggcatttggtgtatcttcttgaaaatgcaatcataaatcttcccaagggacaaaaacaaatgtcttggctcattgatttcactggttggtctatggctgttaatcctcctatgaaaacaacacgcgaaatcattcacattctacagaactattaccctgagagactcggtatcgcctttctctacaatccaccaagactcttccaagcagtctacagggctgctaagtacttcttggacccacgtacagctgaaaaggtgaaatttgtgtacccaaaagacaaagcaagtgatgaactgatggcgacacattttgacgttgagaatctccccaaggaattcggaggtgaagcaacactagagtatgatcatgaagatttctcacgacaaatgtatgaagacgatctcaaaaccgcaaaatactggggactagaggggaagcactatccgaaaacaaacggtttctctccatccgatgttgttcctgagccggcgatagaaatcgcatcagcagctagctga

SEQ ID NO: 7655 - protein, 294 aa, Arabidopsis thaliana
MFRRRNAHQLDNDDSQQDNKVRELKSAIGPLSGHSLVFCSDASLRRFLDARNWDVEKAKKMIQETLKWRSTYKPQEIRWNQVAHEGETGKASRASFHDRQGRVVLIMRPAMQNSTSQEGNIRHLVYLLENAIINLPKGQKQMSWLIDFTGWSMAVNPPMKTTREIIHILQNYYPERLGIAFLYNPPRLFQAVYRAAKYFLDPRTAEKVKFVYPKDKASDELMATHFDVENLPKEFGGEATLEYDHEDFSRQMYEDDLKTAKYWGLEGKHYPKTNGFSPSDVVPEPAIEIASAAS

SEQ ID NO: 7656 - DNA, 744 bp, Gossypium hirsutum
  CDS (1)..(744)
atgatgatgagttcaaataacatggagtgttccgctaaagcgagggaagaagaagagatcaccaaaataagtcttatgagaagcttggttgaaacacaagatccttcttccaaggaagtagatgatatgacaataagaagatttctaagagctcgtgaattagatgtggagaaagcatcgagcatgttcctcaagtacctgaaatggagacgaagctttgttcctaatggtttcatttctccatcagaactcacacatgaaatccaacagaacaagatgtttttacaaggttccgacaacaaaggacgacctatttctgttcttcttgctgcaagacatttccagcataatggcggcctcgacgaattcaagcgttttatactctacattttcgacaaaatattggccaggatgcctccaggacaagataaatttattgtgatcggagatcttgacggttggggatatgcaaattgcgacatccgggcataccttgctgctctatctctcctgcaggattactacccggaaagattaggaaagatgttcatagtgcatgcaccctacgttttcatggcggcctggaaaattgttcaccctttcatcgacgtcaaaaccaggaagaagatagtattcgttgagaacaaaagcctgaaatcaacattgcttgaagaaatagacgagagccaactgccagaaatgtatggtggcacattaccattgattcccattcaagacagctaa

SEQ ID NO: 7657 - protein, 247 aa, Gossypium hirsutum
MMMSSNNMECSAKAREEEEITKISLMRSLVETQDPSSKEVDDMTIRRFLRARELDVEKASSMFLKYLKWRRSFVPNGFISPSELTHEIQQNKMFLQGSDNKGRPISVLLAARHFQHNGGLDEFKRFILYIFDKILARMPPGQDKFIVIGDLDGWGYANCDIRAYLAALSLLQDYYPERLGKMFIVHAPYVFMAAWKIVHPFIDVKTRKKIVFVENKSLKSTLLEEIDESQLPEMYGGTLPLIPIQDS

SEQ ID NO: 7658 - DNA, 936 bp, Ashbya gossypii
  CDS (1)..(936)
atgcctactcgtgtgcaggaagaagaacttttggcatcataccccagcaagtgcgcggcggggtcgctcgccgggacgcccgggaacctgacgagcgagcacgaggcggcgctggaggagctgcgcaaggtgctgaagcaggccggattcaccaagcgtctggacgactcgacgcttttgcggtttctgcgggcgcgcaagttcgacgtggcggctgcgcgggcaatgtttgagaactgcgagaagtggcgtaaggaaaacggcgtggacacgatcttcgaggacttccactacgaggaaaagccgttggtggccaagttctacccgcagtactaccacaagacggacaaggacgggaggccggtgtacatcgaggagctgggcgcggtgaacctgacggagatgtacaagatcacgacgcaggagcgcatgctgaagaacttgatatgggagtacgagtccttctcgcggtaccgcttgccggccagctccagacaggccgactgcctcgtcgagacgtcctgcaccatcctagacctcaagggcatctccatctccgcagccgcgcaggtgctcagctacgtgcgcgaggcctcgaacatcggccagaactactaccccgagcgcatgggcaagttctacatgatcaacgcgccattcggcttctccgccgcattccgcctgttcaagccgttcctggaccctgtcaccgtctccaagattttcatcctgggctcgtcctaccagaaggagctcttgaagcagatccctgcagagaacctgcccgtcaagttcgggggccagtccgacgtcagcgaggccgagggcggcctctacctatccgacattgggccgtggaggaaccccaagtacatcgggcccgagggcgaggctccgaaggccttctccatgtcccccaagccggaatctgcctga

SEQ ID NO: 7659 - protein, 311 aa, Ashbya gossypii
MPTRVQEEELLASYPSKCAAGSLAGTPGNLTSEHEAALEELRKVLKQAGFTKRLDDSTLLRFLRARKFDVAAARAMFENCEKWRKENGVDTIFEDFHYEEKPLVAKFYPQYYHKTDKDGRPVYIEELGAVNLTEMYKITTQERMLKNLIWEYESFSRYRLPASSRQADCLVETSCTILDLKGISISAAAQVLSYVREASNIGQNYYPERMGKFYMINAPFGFSAAFRLFKPFLDPVTVSKIFILGSSYQKELLKQIPAENLPVKFGGQSDVSEAEGGLYLSDIGPWRNPKYIGPEGEAPKAFSMSPKPESA

SEQ ID NO: 7660 - DNA, 906 bp, Candida albicans
  CDS (1)..(906): transl_table=12
atgactacgatgactactgaagaaatattggcttcttatccacaaatcaccgctccaaccgatcaaacaggttacacatcaaatttaacacctgaacaaaaaaccactttagatatattcagacaacaattaactgaattgggttataaagacagattagatgatgcatcacttttaagatttcttagagcaagaaaatttgatattcaaaaagctattgatatgtttgtagcttgtgaaaaatggagagaagattttggtgttaataccattttaaaagatttccattatgaagaaaaacccattgttgctaaaatgtatccaacttattatcataaaactgataaagatggtcgtccagtttattttgaagaattgggtaaagttgatttagtgaaaatgttgaaaatcactactcaagaacgtatgcttaaaaacttggtatgggaatatgaagccatgtgtcaatatcgtttacctgcatgttcaagaaaagctggttatttagtggaaacttcttgtactgtgttagatttactgggtattagtgtgacttcagcttataatgtcattggttatgttagagaagcttcaaaaattggtcaagattattatccagaaagaatgggtaaattttatttgattaatgctccatttgggttttctactgcatttaaattatttaaaccatttttggatccagtgactgtttctaaaattcatattttaggttatagttataaaaaagaattattgaaacaaatcccacctcaaaatttaccagtcaaatttggtggtatgtcagatgtttctgatgacgatttattattaaaagatgttggtccttggagagatccagaattcattggtccagaaggtgaatgtcctagagcttataacatttaa

SEQ ID NO: 7661 - protein, 301 aa, Candida albicans
MTTMTTEEILASYPQITAPTDQTGYTSNLTPEQKTTLDIFRQQLTELGYKDRLDDASLLRFLRARKFDIQKAIDMFVACEKWREDFGVNTILKDFHYEEKPIVAKMYPTYYHKTDKDGRPVYFEELGKVDLVKMLKITTQERMLKNLVWEYEAMCQYRLPACSRKAGYLVETSCTVLDLSGISVTSAYNVIGYVREASKIGQDYYPERMGKFYLINAPFGFSTAFKLFKPFLDPVTVSKIHILGYSYKKELLKQIPPQNLPVKFGGMSDVSDDDLLLKDVGPWRDPEFIGPEGECPRAYNI

SEQ ID NO: 7662 - DNA, 909 bp, Candida glabrata
  CDS (1)..(909)
atggttagtgaagcggagtttttggcgtcttacccacagaagtgtccggctggttctcttccaggcactcccggcaacactgacgaggcccaggaaggtgctttaaagcaattgcgcagcgagttggaagccgctggtttcaaggagaggctagacgactccacgttgctgcgtttcctacgtgcgcgtaagttcgatgtcgctttggcgaaggagatgttcgagaactgcgagaaatggcgcaaagagtacggtaccaacaccatcatgcaggacttccactacgacgagaagcctctggttgcgaagtactacccgcaatactaccacaagaccgacaaggacggccgcccagtgtacttcgaggagctgggtgctgtgaacttgaccgagatggagaagatcaccacccaggaacgtatgttgaagaacttggtgtgggagtacgagtccgtggtcaactacagactgcctgcttgctccagggccgctggctacttggtcgagacgtcttgcacagtcatggacttgaaaggtatctccatctccagcgcatacagcgtcttgagctacgtcagagaggcctcatacatcagtcagaactactacccagaacgtatgggtaagttctacttgattaacgccccattcggtttctccaccgcgttcagactgttcaagcctttcctagacccagtcaccgtctcaaagatcttcatcttgggctcctcttaccaaagcgaactgctgaaacagatcccagcagaaaacttgccatccaagttcggtggtaaatcagaagtagacgaagccgccggtggcctgtacttgtccgacatcggcccatggagagacgccaagtacatcggccctgaaggtgaagccccagagatgttttccatgaaataa

SEQ ID NO: 7663 - protein, 302 aa, Candida glabrata
MVSEAEFLASYPQKCPAGSLPGTPGNTDEAQEGALKQLRSELEAAGFKERLDDSTLLRFLRARKFDVALAKEMFENCEKWRKEYGTNTIMQDFHYDEKPLVAKYYPQYYHKTDKDGRPVYFEELGAVNLTEMEKITTQERMLKNLVWEYESVVNYRLPACSRAAGYLVETSCTVMDLKGISISSAYSVLSYVREASYISQNYYPERMGKFYLINAPFGFSTAFRLFKPFLDPVTVSKIFILGSSYQSELLKQIPAENLPSKFGGKSEVDEAAGGLYLSDIGPWRDAKYIGPEGEAPEMFSMK

SEQ ID NO: 7664 - DNA, 906 bp, Kluyveromyces lactis
  CDS (1)..(906)
atggtaagtgaacaagaaattttagaatcatacccccaggtttgtcctagtggatcattgtctggaacaccaggcaatcttgattcagaacaagaagccaagttgaaggaatttagagaattgttagaatcattgggatataaggaaagacttgatgactcgacgttgttgcgtttcctaagggctcgtaagttcgatctagaggcttccaagatcatgtacgagaactgtgagaaatggagaaaagagtttggtgttgacaccatcttcgaagatttccattacgaagagaaaccgcttgtcgctaaatactacccacaatactatcacaagaccgacaacgatggtcgtcccgtttacattgaagagcttggttctgttaatttgactcagatgtacaagatcaccacgcaagaacgtatgctgaagaacttggtctgggaatacgaagcttttgttagatacagattgcctgcatgttcaagaaaggctggataccttgttgaaacttcatgtaccattctagacttgaaaggtatttccatttccagtgcagcacaagtattgagttatgtcagggaagcttccaatatcggtcaaaactactaccctgaacgtatgggtaaattctacttgatcaacgcaccatttgggttctccactgccttcagattattcaaaccattcttggatccagttaccgtgtcaaagatttttatcttgggatcgtcctaccaaaaggatttgctaaagcaaatccctgccgaaaacttgccaaaaaaatttggtggtcaatccgaggtctcagaagcagaaggcggtctatatctatccgatattggtccatggagagaggaggaatacattggacctgaaggtgaagctccaaaggcttttcaattgtaa

SEQ ID NO: 7665 - protein, 301 aa, Kluyveromyces lactis
MVSEQEILESYPQVCPSGSLSGTPGNLDSEQEAKLKEFRELLESLGYKERLDDSTLLRFLRARKFDLEASKIMYENCEKWRKEFGVDTIFEDFHYEEKPLVAKYYPQYYHKTDNDGRPVYIEELGSVNLTQMYKITTQERMLKNLVWEYEAFVRYRLPACSRKAGYLVETSCTILDLKGISISSAAQVLSYVREASNIGQNYYPERMGKFYLINAPFGFSTAFRLFKPFLDPVTVSKIFILGSSYQKDLLKQIPAENLPKKFGGQSEVSEAEGGLYLSDIGPWREEEYIGPEGEAPKAFQL

SEQ ID NO: 7666 - DNA, 861 bp, Schizosaccharomyces pombe
  CDS (1)..(861)
atgtcagaaactatatcggatccttatcctctaactaatccaaatgctccattagggcacccagggcatttgaattctacacagcaagctacgctagatagcatgcgtttagagttacaaaaacttggatacacggaaagattagacgatgccactttattgcgttttttgagagcccgtaaatttaatttgcaacagtcgctggaaatgtttattaaatgcgaaaagtggagaaaagaatttggtgttgatgatcttatcaaaaactttcattatgatgagaaagaagccgtttccaaatattaccctcaattttatcataaaactgacatcgacggccgtccggtatacgttgagcaactcggtaacattgatttgaagaagttgtaccaaatcacgactcccgagcgtatgatgcaaaatttggtttatgaatatgaaatgcttgctttaaaacggtttcccgcttgttctcgtaaagcaggaggcttgattgaaacttcgtgcacaatcatggatctaaagggtgttggtattactagtattcactcggtttacagctacattcgtcaagcatcaagcattagtcaagattattaccccgaaaggatgggcaagttttatgtaattaacgctccttggggattctcttctgcctttaatcttatcaaaggttttttggatgaggcaactgtcaaaaaaattcatattttaggctcaaactataagagtgctctgctcgaacaaatccctgctgataatcttcctgctaaactcggtggaaactgccaatgtccaggtggctgcgaactatctgacgccggtccatggcatgaagaacagtggatgaacaaaaattag

SEQ ID NO: 7667 - protein, 286 aa, Schizosaccharomyces pombe
MSETISDPYPLTNPNAPLGHPGHLNSTQQATLDSMRLELQKLGYTERLDDATLLRFLRARKFNLQQSLEMFIKCEKWRKEFGVDDLIKNFHYDEKEAVSKYYPQFYHKTDIDGRPVYVEQLGNIDLKKLYQITTPERMMQNLVYEYEMLALKRFPACSRKAGGLIETSCTIMDLKGVGITSIHSVYSYIRQASSISQDYYPERMGKFYVINAPWGFSSAFNLIKGFLDEATVKKIHILGSNYKSALLEQIPADNLPAKLGGNCQCPGGCELSDAGPWHEEQWMNKN

SEQ ID NO: 7668 - DNA, 1479 bp, Yarrowia lipolytica
  CDS (1)..(1479)
atgactgttaccgagcaagaatttctcgcatcgtatccccagaaggtcgcccctggtggacctaccggctaccccggtaacctgacagccgagcaggagcagaagctcggtgagcttaagatgatcctgctgaccaagggttacgaagatcgaaccgatgacgccacgttgctgcggttcctgcgagcccgaaagttcgatgtgcctctggcccaagaaatgtgggagaactgcgaaaagtggagaaaggagttcggcaccaacacaattctggaggacttttggtacaaggagaagaaggaggtggccaagctgtacccccagtactaccacaagaccgacaaggacggccgacccgtctacgtcgagaacgtgggtaaggtgaacatccacgaaatgtacaagatcaccacccaggagcgaatgcttcgaaacctcgtgtgggagtacgagtcgtttgttcgacaccgactgcccgcctgttctcgagttgttggacatctcattgagacctcatgcaccattcttgatctcaagggagtttctctgtcgtcggcctcccaggtctacggcttcctcaaggatgcctccaacattggccagaactactaccccgagcgaatgggtaagttctacctgattaacgcgccgtttggtttctccaccgtcttctccgtcatcaagcgattcctggaccccgtcaccgtgtccaagatccacgtgtacggctccaactacaaggagaagctcctggcccaggtccccgcctacaacctacccatcaagtttggcggccagtcctcctccaagatcggtgttgaactctctgacgacggcccctggagagatccccagtttgtcggccccgagggcttggcccccgtggctggtgagcgacccaccggtgccccctccatcgtctccaactcctccacctacgccaagtccactgcttccaccaaggtcggtgctgacgacaaggccactgacgcaaaggccaacggtaacggagctgctgctgccgctgccggagctggaactgctgctgctggcggtgctgctgctgctgctggagcttcttcttccaagcaggctgctcctgcccaggctgctcctgcccaggccgccaaggctcccgttcccgctgctgccaagaccgccactgcccctgcccccaccggcaagactgctgcacctcagaccaactcgttccctcccgaaatgcttgccatgatggagcagaatgaaaagaaggctgagaaggccgccgaggccaagaccaagggaggggctgctccccaggccaatgccttcaccgacgagcagctcgcacagctcaactcgctgccccagcaggtggccacaggaggagtgtcccagccccttcctgattcgcatgttacccagggagtccccacggtcgccaagattgccgaggctgccgccggtccccatgaggatgcccatcttccccattaa

SEQ ID NO: 7669 - protein, 492 aa, Yarrowia lipolytica
MTVTEQEFLASYPQKVAPGGPTGYPGNLTAEQEQKLGELKMILLTKGYEDRTDDATLLRFLRARKFDVPLAQEMWENCEKWRKEFGTNTILEDFWYKEKKEVAKLYPQYYHKTDKDGRPVYVENVGKVNIHEMYKITTQERMLRNLVWEYESFVRHRLPACSRVVGHLIETSCTILDLKGVSLSSASQVYGFLKDASNIGQNYYPERMGKFYLINAPFGFSTVFSVIKRFLDPVTVSKIHVYGSNYKEKLLAQVPAYNLPIKFGGQSSSKIGVELSDDGPWRDPQFVGPEGLAPVAGERPTGAPSIVSNSSTYAKSTASTKVGADDKATDAKANGNGAAAAAAGAGTAAAGGAAAAAGASSSKQAAPAQAAPAQAAKAPVPAAAKTATAPAPTGKTAAPQTNSFPPEMLAMMEQNEKKAEKAAEAKTKGGAAPQANAFTDEQLAQLNSLPQQVATGGVSQPLPDSHVTQGVPTVAKIAEAAAGPHEDAHLPH

SEQ ID NO: 7670 - DNA, 915 bp, Saccharomyces cerevisiae; identical to SEQ ID NO: 7532
  CDS (1)..(915)

SEQ ID NO: 7671 - protein, 304 aa, Saccharomyces cerevisiae; identical to SEQ ID NO: 7533

SEQ ID NO: 7672 - DNA, 1335 bp, Schizosaccharomyces pombe
  CDS (1)..(1335)
atgcctgaaggagccggtagaccgtggaatctcacagaacttgaagaagagaagttgaagactatgtggagttatttgtttaagctcttcggcattactttactcgaaagaactgaatcttggtacacagtgaagacacacttatctgatgattcaagtagttcctcatcacatcgtttaagcagcgtctcatatgcgaaatcccgtacacgacttgaactaacgtcttcatctcatggctcggacactcgcagttttaatgataaaaccaaaaatgtgcatttggaaagagttgaaaaaattgcaagtgaatgggacccggaagggcttagagtttgcttttgggatgctgttaattgtgatgatcctgatggccttctacttcgtttccttcgtgctcgaaaatggaacgttgaggctgcgttggaaatgttcatgaaaaccgttcactggagaagtagagagatgaatgttggtgaaattgtatgtaacgctgaccaccttgataaagatgatgattttgtgcgtcaactaagaatcggaaagtgttttatattcggtgaagataaacacaatcgtccagtttgttatattcgcgcacgtcttcataaagttggtgatgtctcacccgaatcggttgagcgactcacagtttgggtcatggaaactgctcgtttaattctcaaacctcctattgaaactgctactgttgtttttgatatgactgatttcagtatgtccaatatggactatgggccattgaaattcatgatcaagtgttttgaagcacactatcccgaatgtctgggtgaatgtattgtacacaaagcgccttggcttttccaaggcgtttggtccatcatcaaatcttggcttgatccagtggttgtctcaaaggttaaattcactcgtaattatcgtgatttgcaacaatatataaatcctgacaatattttaaaagaattcggtgggcctaatccatggagatatacatatccagaaccctgtcaaaacgaagcagaagctctgaagaatgttgaagctcgtaagagtcttagagcaaaaaaggatgcaattgctaaacagtacgaggaagttacaatggattggattttgaacaatggtgacatggcagaagtgaaacaaaaacgtcgtaagttagcttcacaacttattgatgcatactggaacttggataaatacatccgcgcacgctcagtttacgaccgcatgggcctaattgctcctcaaacttcccatactttgcttctttctcaacctacaaatggagatgtcaaagaatcaatggtagaagttactagctcggcaacttag

SEQ ID NO: 7673 - protein, 444 aa, Schizosaccharomyces pombe
MPEGAGRPWNLTELEEEKLKTMWSYLFKLFGITLLERTESWYTVKTHLSDDSSSSSSHRLSSVSYAKSRTRLELTSSSHGSDTRSFNDKTKNVHLERVEKIASEWDPEGLRVCFWDAVNCDDPDGLLLRFLRARKWNVEAALEMFMKTVHWRSREMNVGEIVCNADHLDKDDDFVRQLRIGKCFIFGEDKHNRPVCYIRARLHKVGDVSPESVERLTVWVMETARLILKPPIETATVVFDMTDFSMSNMDYGPLKFMIKCFEAHYPECLGECIVHKAPWLFQGVWSIIKSWLDPVVVSKVKFTRNYRDLQQYINPDNILKEFGGPNPWRYTYPEPCQNEAEALKNVEARKSLRAKKDAIAKQYEEVTMDWILNNGDMAEVKQKRRKLASQLIDAYWNLDKYIRARSVYDRMGLIAPQTSHTLLLSQPTNGDVKESMVEVTSSAT

SEQ ID NO: 7674 - DNA, 3027 bp, Schizosaccharomyces pombe
  CDS (1)..(3027)
atgaaagattcggaacatcaccatcatggccacaacggctttagtaagtttctccataaacttggttttggcaagtcaaaaggaaaatcgcataaaagcaataccagcagtattcatgaaagagaaaatactgctgccaaaggacccgcctctaatgtgcgtcctgctcgccctaatgttagcacatcttccacttcgaacgaggtcagaaaatctgtacctgttggtaatcctactgtacataccaaaacagggtcttcttcatctcctgcctcaaagatgagaaatacagtcaacttgcagcatattcaagcagctaaccaaaaaactcgtaatgctgaaggtgaaagaaaggtcgctcaacgcagggtccaatctgataaagctgaagctaatgatgcagccatgagtagttcagctccaacggtagatgtttccgaaggtaattctgccgctgaaccaaaaattacacccgatgattcagatacacccagacttaatgtagatatgaatgataaaataaatgtcgatgaagctgctgctaaatctgatagcaaacttaatgtcgatcagattaattctactacggaatctgaaaaaagagttgagaaagttaatccaaatattgcgaataatccgctaaaatcaccggatgcagtagcatatagcagtgagacggtttctgatgaaaaacaacctactgagcatcctgtatctgctaatgtccctgcaaaatctgaaaaagctgtttgtgatgaaaataccaaaatttcgcttacaaacacagagcattacaagtttcattcacttcgcggagacgttgaagttgttgttggtgatttggaacgtgacggaagagatacctctttaggcgatgcttcggtaaatgaagccgctaaagaaactgacgtcgactctagtcgttttatttcagatgaaaaagccgtgactgaggatgcgatgaaaactgaacatgcctccaatgcccctctcactgatgaaaggcattttcagttccattcttctgaaggagacattgaaggaatcgttgggacaatgcagcgccaaagacaatctgtctcttcgtatgacactatcgttcctagccaattctataaacagaaggtggtgcaaaatagccccccaagcttgttgagcactgataacaaaattccagaatccggctcagatcatccctcaagtcaagataattccagtaaagcatccttggtagaaaactctcagacacaatcatctactccgagaaagccgttgccaactaccactagtcctaaagtaaatccggaaccgcatagcgaaagtatatctgacacacgaccttctactcctagaaaagtgccaccaagtacagttcctaaaatgaacccgaagctccagggtggcaatagcgttacagccccttccacccctagtaaagtgttgccagcgatgagtcccaaggtggctcccaaattccaaggtggacgcagcagtacagcgccctctactcctaataaggtattaccagcagcatctgctaaagctgctccaaagcttcaagaaaaagctgcatcatttgacattcctaataaatctactattatctctactaagtcaacggtagcatcgccaattaaagcaaatgagaacagtcctgccttgaagtctaaagcatcttttgagttccctaaggaattagatcctgatggtacttggaatgcaccaattccttatcctgatgcaaattgtcctatggctcccacttatcggaatttgacttctgaacaagaagaaatgtatgaagaagtacttaaatattgtttggaattaaaagagattcctgtagcgtctaattctagcaagaaaacggatttgattgagttggagcgtctttggctaacacgcgaatgcatccttagatatttgcgtgctactaaatggcacgtttccaatgcaaaaaagcgtattgttgatactttggtatggcgtcgtcacttcggtgttaataatatggatcctgatgaaatccaagaggagaatgcaactggtaagcaagtattgctaggttacgacaaggacggtcgtccctgtttatacctatatccagctaggcaaaacactaaaacctcaccactgcagattcggcatctggttttttcattggagtgtgctattgatcttatgcctccaggagtagagacattggctttgttgattaatttcaagtcttcgtccaatcgttcaaatcccagcgttggtcaaggtaaagaggtactgaatattttgcaaactcattattgtgagcgtcttggaagagcacttgttattaatattccttgggctgtatggggtttttttaaattgatatctccatttattgaccctattacacgagagaagttaaagttcaatgaaccgttggatcgttatgtccctaaggatcaattagattcgaattttggtggatctcttcattttgaatatcatcatgagaagtactggccccagttggtggaattgtgcaagtcacgtcgtcttggcatcttggaaaaatggaggaagatgggatctaaaataggtacaagcgaatgggatttgaagggtggagaggaatatgttgaattaatgcaacagtatgtacgtccttcattgacaaatcgttcatcttctccaactgttactccaactgtaaatactgatagacagccaaagactttaaccaatagtgctgatgagctctctcctcaaaaaagacgagttgagaatcctaagcccgttgtcaaagatgaggggcctgtttctatcgttgaagatgaggaatcgacgcctgttgttacaaaaaaggaggactctattcctgttgctcaatccaccaaagctgatgctgggctcgatgccgagaatgatcttcttcccaaatctggttccggtgtttcagaaacaccagctttttcgcatgcacgagatgtttctacggcttcatttagcgacgctgtttcgtttatcaccgcggatagcatagaatag

SEQ ID NO: 7675 - protein, 1008 aa, Schizosaccharomyces pombe
MKDSEHHHHGHNGFSKFLHKLGFGKSKGKSHKSNTSSIHERENTAAKGPASNVRPARPNVSTSSTSNEVRKSVPVGNPTVHTKTGSSSSPASKMRNTVNLQHIQAANQKTRNAEGERKVAQRRVQSDKAEANDAAMSSSAPTVDVSEGNSAAEPKITPDDSDTPRLNVDMNDKINVDEAAAKSDSKLNVDQINSTTESEKRVEKVNPNIANNPLKSPDAVAYSSETVSDEKQPTEHPVSANVPAKSEKAVCDENTKISLTNTEHYKFHSLRGDVEVVVGDLERDGRDTSLGDASVNEAAKETDVDSSRFISDEKAVTEDAMKTEHASNAPLTDERHFQFHSSEGDIEGIVGTMQRQRQSVSSYDTIVPSQFYKQKVVQNSPPSLLSTDNKIPESGSDHPSSQDNSSKASLVENSQTQSSTPRKPLPTTTSPKVNPEPHSESISDTRPSTPRKVPPSTVPKMNPKLQGGNSVTAPSTPSKVLPAMSPKVAPKFQGGRSSTAPSTPNKVLPAASAKAAPKLQEKAASFDIPNKSTIISTKSTVASPIKANENSPALKSKASFEFPKELDPDGTWNAPIPYPDANCPMAPTYRNLTSEQEEMYEEVLKYCLELKEIPVASNSSKKTDLIELERLWLTRECILRYLRATKWHVSNAKKRIVDTLVWRRHFGVNNMDPDEIQEENATGKQVLLGYDKDGRPCLYLYPARQNTKTSPLQIRHLVFSLECAIDLMPPGVETLALLINFKSSSNRSNPSVGQGKEVLNILQTHYCERLGRALVINIPWAVWGFFKLISPFIDPITREKLKFNEPLDRYVPKDQLDSNFGGSLHFEYHHEKYWPQLVELCKSRRLGILEKWRKMGSKIGTSEWDLKGGEEYVELMQQYVRPSLTNRSSSPTVTPTVNTDRQPKTLTNSADELSPQKRRVENPKPVVKDEGPVSIVEDEESTPVVTKKEDSIPVAQSTKADAGLDAENDLLPKSGSGVSETPAFSHARDVSTASFSDAVSFITADSIE

SEQ ID NO: 7676 - DNA, 933 bp, Saccharomyces cerevisiae
  CDS (1)..(933)
atgacaaccagcatactcgatacttatcctcaaatatgctcccccaatgctttgccaggtactcccggcaatttgactaaggagcaagaggaagcgcttttgcaatttaggtcaatcttgttagaaaagaattacaaagaaaggctggatgattctacgctattgcgatttctacgggcaaggaaatttgatatcaatgctagcgttgagatgtttgtagaaactgaacgatggagggaagaatacggtgccaacactattatcgaggattatgaaaacaacaaggaagccgaagacaaagaaagaatcaaattggccaaaatgtaccctcagtattaccatcacgttgataaggatgggagaccattgtacttcgaagaactaggaggaattaacttaaagaaaatgtacaagatcactaccgaaaaacagatgctaagaaacttagtcaaggagtacgaattatttgccacgtaccgggtcccagcgtgttcgagaagagctggctaccttattgaaacttcgtgcactgtgctggacttgaagggtatctcactttctaatgcttatcatgtgctttcctatattaaagatgttgcagatatcagtcaaaattattatcctgaaagaatgggtaagttttatattatacacagtccatttggtttctcgacgatgttcaagatggttaaacccttcttggatccagtaaccgtgtcaaaaatctttattcttggctcttcttataaaaaggaattattaaaacaaattccaatcgagaacttgcctgttaaatatggtggtacatctgtcttgcacaaccctaatgataagttctactattccgatattggtccctggagagaccctagatacatcggaccagaaggtgaaattcccaacatttttggtaaatttactgttaccagctaa

SEQ ID NO: 7677 - protein, 310 aa, Saccharomyces cerevisiae
MTTSILDTYPQICSPNALPGTPGNLTKEQEEALLQFRSILLEKNYKERLDDSTLLRFLRARKFDINASVEMFVETERWREEYGANTIIEDYENNKEAEDKERIKLAKMYPQYYHHVDKDGRPLYFEELGGINLKKMYKITTEKQMLRNLVKEYELFATYRVPACSRRAGYLIETSCTVLDLKGISLSNAYHVLSYIKDVADISQNYYPERMGKFYIIHSPFGFSTMFKMVKPFLDPVTVSKIFILGSSYKKELLKQIPIENLPVKYGGTSVLHNPNDKFYYSDIGPWRDPRYIGPEGEIPNIFGKFTVTS

SEQ ID NO: 7678 - DNA, 1053 bp, Saccharomyces cerevisiae
  CDS (1)..(1053)
atgggtcttttttcaagaaaacgggaccacacgcctgctgtgcctaaagagaaacttattccatgtgataagatattcttggaccctcctgccaagtatggtaacgcacctctactggaacccatctccgaagatcaaaacgaaaaatatagagctgtcttacgacattttcaagatgatgatctgaaattaccagaaaatctcaatgaccttgacaatgggacacatgccaatgacagacccttgagtgattgggagaagttttggctttctagggagtgttttctaagatacctaagagccaataaatggaacaccgcgaacgccataaaaggtctcaccaaaaccttggtatggaggagagaaattggacttacacatggtaaggaggacaaagaccctttaacagctgacaaagttgccgttgagaacgaaactggtaaacaggttattttgggctttgacaacgctaaaagacctctatactacatgaaaaatggtcgtcaaaacacagaatcttcctttagacaagtccaagaattagtctacatgatggaaactgcgacaactgtagctccccaaggtgtagaaaagatcacagtcttggtagatttcaaaagttataaagaacctggtattatcactgataaagctccacccatctctattgctaggatgtgtttgaacgtcatgcaagatcattaccctgaaaggttagctaagtgtgtcctgatcaatatcccatggtttgcgtgggcttttttgaagatgatgtatccgttccttgaccctgccactaaggcgaaggctatctttgacgaaccatttgaaaaccacatagagccatctcaactagatgctctatacaatggtctgttagacttcaagtataaacatgaagtctattggccagatatggttaagaaagttgacgatttacgattgaaacgttttgatagatttttaaagtttggaggcattgtcggattaagtgaatatgacaccaagggccaacatgacgaattaaaatatcctgttgatatggtcatttga

SEQ ID NO: 7679 - protein, 350 aa, Saccharomyces cerevisiae
MGLFSRKRDHTPAVPKEKLIPCDKIFLDPPAKYGNAPLLEPISEDQNEKYRAVLRHFQDDDLKLPENLNDLDNGTHANDRPLSDWEKFWLSRECFLRYLRANKWNTANAIKGLTKTLVWRREIGLTHGKEDKDPLTADKVAVENETGKQVILGFDNAKRPLYYMKNGRQNTESSFRQVQELVYMMETATTVAPQGVEKITVLVDFKSYKEPGIITDKAPPISIARMCLNVMQDHYPERLAKCVLINIPWFAWAFLKMMYPFLDPATKAKAIFDEPFENHIEPSQLDALYNGLLDFKYKHEVYWPDMVKKVDDLRLKRFDRFLKFGGIVGLSEYDTKGQHDELKYPVDMVI

SEQ ID NO: 7680 - DNA, 1176 bp, Brassica napus
  CDS (109)..(1002)
agctccgactcacgaggacctctcactctcactctcgatctctctcgctattccttcgatcgtctcgactactggattttgatactgcacactagtgtgttattcaaaatgtttcgccgcaagactacttcgcaagctgaacaagagaataatgaagcagctctcagagaggcaaagatcaaagaggtcaagactctcataggtgagctctctggaaggagttcactctactgttcagatccctgtctcaagagatatcttgaagctaggaactggaacgttggcaaagccaagaagatgcttgaagagacgctgaaatggagatcaaccttcaaacctgaagagatccgttgggatgaagtttcaggtgaaggtgagactgggaaagtctacaaagctggattccatgacagaagtggaagaacggttcttatactcagacctggattgcagaacaccaagtctttggagaaccagatgaaacatttagtgtatctcattgagaatgctattatgaatctcccggaggatcaagagcagatgtcttggctcattgattttacagactggtcgctgagcaccagtgtgcctatcaaatccgccagggaaactatcaacatactgcagaatcactaccctgagagactagctgtcgctttcctctataaccctccaaggctctttgaggcattctggaagatagtgaagtacttcattgatgcaaagacattcatcaaggtgaagtttgtttacccgaagaaccctgaaagcgtggagcttatgagctcatttttcgacgaggagaacctcccaacggagtttggagggaaggctttgttgcagtataaccatgaagagttctctaagcaaatgaaccaagacgatgttaaaactgcagacttttggggattggttcatagtaacaacaatcaccagcagcagtccagcagtggattttctggagctgagattgctcctgagccaatacaaaccaacacttaaaactagctttgaaaggctatgtattgttgtaaccaaccctttttcaaatggggacaaagataaagatagctcttgatgcttagaggagaggacacagagatgtaagatttagactcggtatttgattaaataaaaggatttgtgtgttaaaaaaaaaaaaaaaaaagcggccgc

SEQ ID NO: 7681 - protein, 297 aa, Brassica napus
MFRRKTTSQAEQENNEAALREAKIKEVKTLIGELSGRSSLYCSDPCLKRYLEARNWNVGKAKKMLEETLKWRSTFKPEEIRWDEVSGEGETGKVYKAGFHDRSGRTVLILRPGLQNTKSLENQMKHLVYLIENAIMNLPEDQEQMSWLIDFTDWSLSTSVPIKSARETINILQNHYPERLAVAFLYNPPRLFEAFWKIVKYFIDAKTFIKVKFVYPKNPESVELMSSFFDEENLPTEFGGKALLQYNHEEFSKQMNQDDVKTADFWGLVHSNNNHQQQSSSGFSGAEIAPEPIQTNT

SEQ ID NO: 7682 - DNA, 861 bp, Glycine max
  CDS (1)..(861)
atgtttcatcgctggagcaattctcatcaacaagatcagggaagcagcgagctttgtactgaatccaagattaaagagctgaagggtgctattggacccttatctggacgcagtttgatgtattgcactgattcatgttttaagagatatttggaagctcgaaactggaacgtagacaagtccaagaagatgttggaggagacactcaggtggagatcaacctataagccagaagaaattcgctggcatgaggttgcaatagaaggagagactgggaaattgtatagagcaaattttcatgatagacaaggaaggaatgttcttattttgaggccaggaatgcagaacactacttcaatggagaatcagctgcggcatcttgtgtatcttttggaaaatgccatgcttaaccttccaccgggtcaagaacaaatgtcatggttgatagacttcactggatggtcaataaccaacaatgtgccccttaaattagccagagagaccatcaacattttgcagaaccattaccctgagaggcttgccattgcatttctttacaacccccctcgagtttttgaagctttttggaagatagtcaagtacttcttggacaacaagacatttcaaaaggtgaagtttgtctacccgaataataaagatagtgtgcaggtcatgaagtcctattttgatgaggaaaatctgcccaaagaactaggtggaaaaagcataatgagttataaccatgaggagttctccagattaatggttcaggatgatttgaagtgtgcagcattttggggatctgatgggaagctctcaaaccacattgtcaacgggaattctgcatcagttctaaaatga

SEQ ID NO: 7683 - protein, 286 aa, Glycine max
MFHRWSNSHQQDQGSSELCTESKIKELKGAIGPLSGRSLMYCTDSCFKRYLEARNWNVDKSKKMLEETLRWRSTYKPEEIRWHEVAIEGETGKLYRANFHDRQGRNVLILRPGMQNTTSMENQLRHLVYLLENAMLNLPPGQEQMSWLIDFTGWSITNNVPLKLARETINILQNHYPERLAIAFLYNPPRVFEAFWKIVKYFLDNKTFQKVKFVYPNNKDSVQVMKSYFDEENLPKELGGKSIMSYNHEEFSRLMVQDDLKCAAFWGSDGKLSNHIVNGNSASVLK

SEQ ID NO: 7684 - DNA, 891 bp, Glycine max
  CDS (1)..(891)
atgttccttcttagaaggcaaacccagaataaccatgagaatgattcctcatatcaagatacaaaggtggctgaactcaagacagctcttgggcccctctctggtcgtcaattaaagtattgcacagatgcatgtctaaggagatatttagaagcaagaaactggaatgttgataaagctaagaaaatgctggaggaaacacttaagtggagggcaacttataagccagaggaaatccgttgggctgaaatagcacatgagggtgaaacaggcaaagtctccagagctaactttcatgatcgacatgggagggctgtgcttattatgaggccagggatgcagaatacaacatcggctgaagataatatcaggcatttagtctatctgttggaaaatgctatcctgaatctttctgaaggtcaagaacaaatgtcatggttgatagacttcacaggattatcacttagtacaaatatatctgttaaaacatctcgtgatattattcacattttacaaaaccactatccagaaaggcttgctatcgcttttctgtacaatcccccaagaatatttcaggctttctggaaggccatcagattcttcctggatcccaacacagtccagaaggtgaagtttgtttatcctaacaataaggacagtgtggagctgatgaaatcactcttcgacatggaaaaccttccaagtgaatttggggggaaaacaagtttaaagtatgaccatgaagagttctcgcgattgatgactgaggatgatgtgaaaactgccaagttctggggacttgatgaggagcccttcaaccctcctaagaaggggcattctggagcagaggtggcaccagaaccagtgcctgttcaggcagtagttagttag

SEQ ID NO: 7685 - protein, 296 aa, Glycine max
MFLLRRQTQNNHENDSSYQDTKVAELKTALGPLSGRQLKYCTDACLRRYLEARNWNVDKAKKMLEETLKWRATYKPEEIRWAEIAHEGETGKVSRANFHDRHGRAVLIMRPGMQNTTSAEDNIRHLVYLLENAILNLSEGQEQMSWLIDFTGLSLSTNISVKTSRDIIHILQNHYPERLAIAFLYNPPRIFQAFWKAIRFFLDPNTVQKVKFVYPNNKDSVELMKSLFDMENLPSEFGGKTSLKYDHEEFSRLMTEDDVKTAKFWGLDEEPFNPPKKGHSGAEVAPEPVPVQAVVS

SEQ ID NO: 7686 - DNA, 951 bp, Zea mays
  CDS (1)..(951)
atgtcctttctattcaagtctagcaatggcggcaccactgaaaaaatcccatccccagaagaacagcgagaaaaaataaatgaattacgcaaggagcttggtgaacactcatcagcagccattaaagacttcctttcagatgcctcgttagcgagatttcttcgagcaaggaactggaatgtgcagaaagctagtaaaatgatgaaagcagctgtgaagtggcggcttgcattcaaacctgaaaacatctgttgggatgatattgcagaggaagcagagactggaaagatatatagagcggattataaggacaaacatggcagaactgttcttgtattgaggcctggcttagagaacactacctcagcaataggacaaatcaaatatctagtctactctctggagaaagcaattatgaacctgacggaagatcaagagaagatggtatggctgacagatttccagtgctggacattgggaagcacaccactgaaggtgacccgtgagactgtcaatgtcttgcaagactgctatcctgagaggttggggcttgcaatcctttacaaccctcctaggatatttgaatcattctggaagatagtgaagccgttcctagaccatgagacccgcaagaaggtgaagtttgtgtactccaacgacaaggagagccagaagataatggcagaagtctttgacatggaggagctcgactcggcattcgggggaaagaacccagcgacatttgagtacaacagctacgcagagcagatgcaggacgacgacaagaagatgggatcttcgcacggctcagccaatagcttgcttggatcagctgggaaggaggctaatggcgcagactcggacgcctcaagcgaggcctccttctacagtggaactgactctccgacacatgagaacggtgaacacagcatcgcgaagaagaatggttga

SEQ ID NO: 7687 - protein, 316 aa, Zea mays
MSFLFKSSNGGTTEKIPSPEEQREKINELRKELGEHSSAAIKDFLSDASLARFLRARNWNVQKASKMMKAAVKWRLAFKPENICWDDIAEEAETGKIYRADYKDKHGRTVLVLRPGLENTTSAIGQIKYLVYSLEKAIMNLTEDQEKMVWLTDFQCWTLGSTPLKVTRETVNVLQDCYPERLGLAILYNPPRIFESFWKIVKPFLDHETRKKVKFVYSNDKESQKIMAEVFDMEELDSAFGGKNPATFEYNSYAEQMQDDDKKMGSSHGSANSLLGSAGKEANGADSDASSEASFYSGTDSPTHENGEHSIAKKNG

SEQ ID NO: 7688 - DNA, 891 bp, Glycine max
  CDS (1)..(891)
atgttccttcttagaaggcaaacccagaataaccaggagaatgattcctcatatcaagatacaaaggtggctgaactcaagacaggtcttgggcccctctctggtcgtcgattaaagtattgcacagatgcatgtctaaggagatatttagaagcaagaaactggaatgttgataaagctaagaaaatgctggaggaaacactcaagtggagggcaacttataagccagaggaaatccgttgggctgaaatagcacatgagggtgaaacaggcaaagtctccagagctaacttccatgatcgacttgggaggactgtgcttattatgaggccagggatgcagaacacaacatcggctgaagataatatcaggcatttagtctatctgttggaaaatgctatcctaaatctttctgaaggtcaagaacaaatgtcatggttgatagacttcacaggattatcacttagtacaaatatgtctgttaaaacatctcgtgatattattcacattttacaaaaccactatccagaaaggcttgctattgcttttatgtacaatccaccaagaatattccaggctttctggaaggccatcagattcttcctggatcccaagacagtccagaaggtgaagtttgtttatcctaacaataaggacagtgtggagctgataaaatcactcttccccacggaaaaccttccaagtgaatttggggggaaaacaagtctaaactatgaccatgaagagttctcgcgattgatgaccgaggatgatgtgaaaactgccaagttctggggacttgatgagaagcccttcaaccctcctaagaaggggcattcgggagcagaggtggcaccggaaccagtgcctgttgaggcagtagttagttag

SEQ ID NO: 7689 - protein, 296 aa, Glycine max
MFLLRRQTQNNQENDSSYQDTKVAELKTGLGPLSGRRLKYCTDACLRRYLEARNWNVDKAKKMLEETLKWRATYKPEEIRWAEIAHEGETGKVSRANFHDRLGRTVLIMRPGMQNTTSAEDNIRHLVYLLENAILNLSEGQEQMSWLIDFTGLSLSTNMSVKTSRDIIHILQNHYPERLAIAFMYNPPRIFQAFWKAIRFFLDPKTVQKVKFVYPNNKDSVELIKSLFPTENLPSEFGGKTSLNYDHEEFSRLMTEDDVKTAKFWGLDEKPFNPPKKGHSGAEVAPEPVPVEAVVS

SEQ ID NO: 7690 - DNA, 951 bp, Zea mays
  CDS (1)..(951)
atgtcctttctattcaagtctagcaatggcggcaccactgaaaaaatcccatccccagaagaacagcgagaaaaaataaatgaattacgcaaggagcttggtgaacactcatcagcagccattaaagacttcctttcagatgcctcgttagtgcgatttcttcgagcaaggaactggaatgtgcagaaagctagtaaaatgatgaaagcagctgtgaagtggcggcttgcattcaaacctgaaaacatctgttgggatgatattgcagaggaagcagagactggaaagatatatagggcggattataaggacaaacatggcagaactgttcttgtattgaggcctggcttagagaacactacctcagcaataggacagatcaaatatctagtctactctctggagaaagcaattatgaacctgacggaagatcaagagaagatggtatggctgacagatttccagtgctggacattgggaagcacaccactgaaggtgacccgtgagactgtcaatgtcttgcaagactgctatcctgagaggttggggcttgcaatcctttacaaccctcctaggatatttgaatcattctggaagatagtgaagccgttcctagaccatgagacccgcaagaaggtgaagtttgtgtactccaacgacaaggagagccagaagataatggcagaagtctttgacatggaggagctcgactcggcattcgggggaaagaacccagcgacatttgagtacaacagctacgcagagcagatgcaggaggacgacaagaagatgggatctttgcacggctcagccaatagcttgcttggatcagctgggaaggaggctaatggcgcagactcggacgcctcaagcgaggcctccttctacagtggaactgactctccgacacatgagaacggtgaacacagcatcgcgaagaagaatggttga

SEQ ID NO: 7691 - protein, 316 aa, Zea mays
MSFLFKSSNGGTTEKIPSPEEQREKINELRKELGEHSSAAIKDFLSDASLVRFLRARNWNVQKASKMMKAAVKWRLAFKPENICWDDIAEEAETGKIYRADYKDKHGRTVLVLRPGLENTTSAIGQIKYLVYSLEKAIMNLTEDQEKMVWLTDFQCWTLGSTPLKVTRETVNVLQDCYPERLGLAILYNPPRIFESFWKIVKPFLDHETRKKVKFVYSNDKESQKIMAEVFDMEELDSAFGGKNPATFEYNSYAEQMQEDDKKMGSLHGSANSLLGSAGKEANGADSDASSEASFYSGTDSPTHENGEHSIAKKNG

SEQ ID NO: 7692 - DNA, 27 bp, Artificial Sequence
  Primer
atgttcaagagatttagcaaaaagaag

SEQ ID NO: 7693 - DNA, 25 bp, Artificial Sequence
  Primer
ttacacggtactgctttccgatttt

SEQ ID NO: 7694 - protein, 230 aa, Artificial sequence
  Variant (2)..(2): Xaa in position 2 is any amino acid
  Variant (4)..(10): Xaa in position 4 to 10 is any amino acid
  Variant (11)..(20): Xaa in position 11 to 20 is any or no amino acid
  Variant (23)..(51): Xaa in position 23 to 51 is any amino acid
  Variant (52)..(96): Xaa in position 52 to 96 is any or no amino acid
  Variant (98)..(103): Xaa in position 98 to 103 is any amino acid
  Variant (104)..(123): Xaa in position 104 to 123 is any or no amino acid
  Variant (125)..(147): Xaa in position 125 to 147 is any amino acid
  Variant (148)..(156): Xaa in position 148 to 156 is any or no amino acid
  Variant (160)..(169): Xaa in position 160 to 169 is any amino acid
  Variant (171)..(185): Xaa in position 171 to 185 is any amino acid
  Variant (186)..(190): Xaa in position 186 to 190 is any or no amino acid
  Variant (192)..(211): Xaa in position 192 to 211 is any amino acid
  Variant (212)..(228): Xaa in position 212 to 228 is any or no amino acid
LXAXXXXXXXXXXXXXXXXXWRXXXXXXXXXXXXXXXXXXXXXXXXXXXXXXXXXXXXXXXXXXXXXXXXXXXXXXXXXXXXXXXXXXXXXXXXXXEXXXXXXXXXXXXXXXXXXXXXXXXXXDXXXXXXXXXXXXXXXXXXXXXXXXXXXXXXXXYPEXXXXXXXXXXPXXXXXXXXXXXXXXXXXXXXKXXXXXXXXXXXXXXXXXXXXXXXXXXXXXXXXXXXXXGG

SEQ ID NO: 7695 - DNA, 1290 bp, Saccharomyces cerevisiae
  CDS (1)..(1290)
atgtctgcattgagaaacatcaagttcaatgaagaagaagatggtgaactaccctgcctcgtaacaggtgaagaaaataatctacaagaaattttggaaaatgtctcgtatgatggtggaaatattgttagcgatgcaaaagttgaaagggtaaacaagcaagtggagaacacttctgcaggcgcaacagatgtgcacgagaaaaagcgtattcctgtgagcattattaccggctatctaggatcaggtaaatcgacgttgctggaaaaaattgcattaaaaggtgcagataaaaaaattgccgtaattttaaatgaatttggagattctagtgaaatcgaaaaggctatgaccattaaaaatggatcgaacagctaccaagaatggttggatttgggtaacgggtgtctgtgttgttcgttgaaaaatataggtgttaaagccatcgaagatatggtggagcgttcacctggtaaaatcgattatatccttttagagacctccggtattgcagatcccgcccccattgcgaaaatgttctggcaggacgaaggattgaatagcagcgtttacattgacgggatcatcacggttttggattgtgagcatatactaaaatgcttagatgatatttccatcgatgcccattggcatggtgacaaagttggtttggaggggaatctgactattgcacacttccaactagccatggctgatcgaattataatgaacaaatacgatactatcgaacattcaccagaaatggtcaaacaattaaaagaaagagtacgggaaataaattctatcgcaccgatgttcttcaccaagtatagtgatacgccgattcaaaatttactagatattcatgcatacgacagtgtacggatatctgacatcttagatagtggtagcggaaacggtaccattcatgatgatcgaatgggcacaataatgcttactttcagaccattaaaaaacgaggaagaatataataataagtttattaagcaatttttgcaacctttattgtggaagaattttggagccatgacagtgctgggagggcgtcgccgagatgacggccgtgattgggaagtacaaagaactaaaggtctgatacttattgaaggagagaaccccattgctcgtgtaatccaaggcgtccgcgacacctacgatgtctttccaggcaaatatgacggatccaataaagagtgtaaaattgtgctgattgggaagtacctagaaaaggaatccatagaggaactgttacgtaaaaccctggaatga

SEQ ID NO: 7696 - protein, 429 aa, Saccharomyces cerevisiae
MSALRNIKFNEEEDGELPCLVTGEENNLQEILENVSYDGGNIVSDAKVERVNKQVENTSAGATDVHEKKRIPVSIITGYLGSGKSTLLEKIALKGADKKIAVILNEFGDSSEIEKAMTIKNGSNSYQEWLDLGNGCLCCSLKNIGVKAIEDMVERSPGKIDYILLETSGIADPAPIAKMFWQDEGLNSSVYIDGIITVLDCEHILKCLDDISIDAHWHGDKVGLEGNLTIAHFQLAMADRIIMNKYDTIEHSPEMVKQLKERVREINSIAPMFFTKYSDTPIQNLLDIHAYDSVRISDILDSGSGNGTIHDDRMGTIMLTFRPLKNEEEYNNKFIKQFLQPLLWKNFGAMTVLGGRRRDDGRDWEVQRTKGLILIEGENPIARVIQGVRDTYDVFPGKYDGSNKECKIVLIGKYLEKESIEELLRKTLE

SEQ ID NO: 7697 - DNA, 1188 bp, Pan troglodytes
  CDS (1)..(1188)
atgttaccggctgttggatctgcggatgaggaagaggatcctgcggaggaggattgtcctgaattggttcccattgagacgacgcaaagcgaggaggaggaaaagtctggcctcggcgccaagatcccagtcacaatcatcaccgggtatttaggtgctgggaagacaacacttctgaactatattttgacagagcaacatagtaaaagagtagcggtcattttaaatgaatttggggaaggaagtgcgctggagaaatccttagctgtcagccaaggtggagagctctatgaagagtggctggaacttagaaacggttgcctctgctgttcagtgaaggacaatggccttagagctattgagaatttgatgcaaaagaaggggaaatttgattacatactgttagagaccactggattagcagaccctggtgcagtggcttctatgttttgggttgatgctgaattagggagtgatatttaccttgatggtatcataactattgtggattcaaaatatggattaaaacatttaacagaagagaaacctgatggccttatcaatgaagctactaggcaagttgctttggcagatatcattctcattaataaaacagacttggttccagaagaagatgtaaagaaattaagaacgacaattagatccataaatggactaggacaaatcttagaaacacaaagatcaagagttgatctctctaatgtattagatcttcatgcctttgatagtctctctggaataagtttgcagaaaaaacttcagcatgtgccaggaacacaacctcaccttgatcagagtattgttacaatcacatttgaagtaccaggaaatgcaaaggaagaacatcttaatatgtttattcagaatctcctgtgggaaaagaatgtgagaaacaaggacaatcactgcatggaggtcataaggctgaagggattggtgtcaatcaaagacaaatcacaacaagtgattgtccagggtgtccatgagctctatgatctggaggagactccagtgagctggaaggatgacactgagagaacaaatcgattggtcctccttggcagaaatttagataaggatatccttaaacagctgtttatagctactgtgacagaaacagaaaagcagtggacaacacatttcaaagaagatcaagtttgtacataa

SEQ ID NO: 7698 - protein, 395 aa, Pan troglodytes
MLPAVGSADEEEDPAEEDCPELVPIETTQSEEEEKSGLGAKIPVTIITGYLGAGKTTLLNYILTEQHSKRVAVILNEFGEGSALEKSLAVSQGGELYEEWLELRNGCLCCSVKDNGLRAIENLMQKKGKFDYILLETTGLADPGAVASMFWVDAELGSDIYLDGIITIVDSKYGLKHLTEEKPDGLINEATRQVALADIILINKTDLVPEEDVKKLRTTIRSINGLGQILETQRSRVDLSNVLDLHAFDSLSGISLQKKLQHVPGTQPHLDQSIVTITFEVPGNAKEEHLNMFIQNLLWEKNVRNKDNHCMEVIRLKGLVSIKDKSQQVIVQGVHELYDLEETPVSWKDDTERTNRLVLLGRNLDKDILKQLFIATVTETEKQWTTHFKEDQVCT

SEQ ID NO: 7699 - DNA, 1089 bp, Xenopus tropicalis
  CDS (1)..(1089)
atggaggatgaggaggactgcccagtacttgttcccataacagattttgcgcacgcgaatgagccagatcgcaaaatccctgtcactataattacaggttatttaggtgcaggaaagactacgctgttgaactatattctgacagaacagcacaacaaaagaattgctgtaattatcaacgagtttggggaaggaagtgctgtggagaagtctttagctataagtcaagctggtgaactgtatgaagaatggctggaattaaggaatggctgtctctgttgctcagtaaaagacaatggtcttaaagccattgaaaatctaatgcagaagaaagggaagtttgactatatacttctggaaactactggattagcagatccaggtgcagtagcctctatgttttgggtggatgctgaactgggaagtgacatatacttagatggcattgtatctgtagtcgatgctaaatatgcactgaagcaccttcaagaggagaaaccagagagccttatcaatgaggcagcaaggcaggtggctttggctgatgtactgatcataaataaaacagatttagttgcagaagaagaactggatgccgtaagatcaaccgtgagctctatcaacggacttgtcaaaattctggagacccagagagcaagggttaacttaatggatatactggacctgcatgcatttgacagcctctctggaaagggttttcaggataaattggtggccagtgcagtccatccacatcttgataagagcattgtgaccgttacatttgaagtgcttggcagtataactgaagaaaacctgaatttgtttgtacagaatctgctgtgggagaagaatgtaataaacaggataggacatcccatagaagttatcagactgaagggattggtgtcaatcaaggacaaaccacagcaagtgattttgcaaggtgtccatgaattgtatgatttggaagagacccaaatgacctggcaggacaatggtgatcgaataaaccgcctggtttttataggtagacatctggataaggagacactcaagcagctgtttgtgtcagctcagaatgcttga

SEQ ID NO: 7700 - protein, 362 aa, Xenopus tropicalis
MEDEEDCPVLVPITDFAHANEPDRKIPVTIITGYLGAGKTTLLNYILTEQHNKRIAVIINEFGEGSAVEKSLAISQAGELYEEWLELRNGCLCCSVKDNGLKAIENLMQKKGKFDYILLETTGLADPGAVASMFWVDAELGSDIYLDGIVSVVDAKYALKHLQEEKPESLINEAARQVALADVLIINKTDLVAEEELDAVRSTVSSINGLVKILETQRARVNLMDILDLHAFDSLSGKGFQDKLVASAVHPHLDKSIVTVTFEVLGSITEENLNLFVQNLLWEKNVINRIGHPIEVIRLKGLVSIKDKPQQVILQGVHELYDLEETQMTWQDNGDRINRLVFIGRHLDKETLKQLFVSAQNA

SEQ ID NO: 7701 - DNA, 861 bp, Homo sapiens
  CDS (1)..(861)
atgttaccggctgttggatctgtggatgaggaagaggatcctgcggaggaggattgtcctgaattggttcccattgagacgacgcaaagcgaggaggaggaaaagtctggcctcggcgccaagatcccagtcacaattatcaccgggtatttaggtgctgggaagacaacacttctgaactatattttgacagagcaacatagtaaaagagtagcggtcattttaaatgaatctggggaaggaagtgcgctggagaaatccttagctgtcagccaaggtggagagctctatgaagagtggctggaacttagaaacggttgcctctgctgttcagtgaaggacaatggccttagagctattgagaatttgatgcaaaagaaggggaaatttgattacatactgttagagaccactggattagcagaccctggtgcagtggcttctatgttttgggttgatgctgaattagggagtgatatttaccttgatggtatcataactattgtggattcaaaatatggattaaaacatttaacagaagagaaacctgatggccttatcaatgaagctactagatccataaatggactaggacaaatcttagaaacacaaagatcaagtttgcagaaaaaacttcagcatgtgccaggaacacaacctcaccttgatcagagtattgttacaatcacatttgaagtaccaggaaatgcaaaggaagaacatcttaatgtttattcagaatctcctgtgggaaaagaatgtgagaaacaaggacaatcactgcatggaggtcataaggctgaagggattggtgtcaatcaaagacaaatcacaacaagtgattgtccagggtgtccatga

SEQ ID NO: 7702 - protein, 286 aa, Homo sapiens
MLPAVGSVDEEEDPAEEDCPELVPIETTQSEEEEKSGLGAKIPVTIITGYLGAGKTTLLNYILTEQHSKRVAVILNESGEGSALEKSLAVSQGGELYEEWLELRNGCLCCSVKDNGLRAIENLMQKKGKFDYILLETTGLADPGAVASMFWVDAELGSDIYLDGIITIVDSKYGLKHLTEEKPDGLINEATRSINGLGQILETQRSSLQKKLQHVPGTQPHLDQSIVTITFEVPGNAKEEHLNVYSESPVGKECEKQGQSLHGGHKAEGIGVNQRQITTSDCPGCP

SEQ ID NO: 7703 - DNA, 1113 bp, Gallus gallus
  CDS (1)..(1113)
atggaggatgaagactgccccgatctggtgccgatagacgtcggtatcgtgcaggacagcgagcctggctccggcaggaagatccccgtgaccatcatcacgggttacctaggtgctgggaaaacaacgcttctgaattacattctgactgaacaacatagcaagagaatcgcagtgatactgaatgagtttggagaagggagtgcactggagaaatctttggcaatcagtcagggaggagaactctatgaagaatggctggagctaagaaatggctgtttgtgctgctcagtaaaggacaatggtgtgaaggctattgagaacctcatgcaaaagagaggaaaatttgactatatattgttggaaacaactggtttggcagatccaggagctgtggcctccatgttctgggttgattctgagctgggaagcgacatctatcttgatggcattgtatctgttgttgatgcaaagcatggattgcagcacttgacagaggagaaaccggaaggccttgtcaatgaagcggcaaggcaggttgcattagctgatcttataatcatcaataaaacggatttggtttcaggggaagaactgaataaagtcagagcgtctgtcaggtcaataaatggactcgtcaaaattttggagacacaaaggtcaagagttgatctttccaatgtactggacctgcatgcttttgacagtctatctggaataagcttgcagaaaaaacttgagaatatgaagacagcacatgcacatctagataagggtatagtgacggtaacatttgaagtcctaggaaacatcaaggaagaaaaccttaatctctttatacagaatcttctgtgggaaaagaatgtgaaagataagactggacgtaccatggatgtcataagactgaagggactcgtatctattcaaggcaaatctcatcaagtgatagtccaaggtgtccatgagctctacgacctggaagagactgcagtagcatggaaggaagatgaaaaaagaacaaatagacttgttttaattggtaggaacttgaataaggaaatcatcaaagaagtattcatagaaactgtgtcagagaagcatgaaagcagttga

SEQ ID NO: 7704 - protein, 370 aa, Gallus gallus
MEDEDCPDLVPIDVGIVQDSEPGSGRKIPVTIITGYLGAGKTTLLNYILTEQHSKRIAVILNEFGEGSALEKSLAISQGGELYEEWLELRNGCLCCSVKDNGVKAIENLMQKRGKFDYILLETTGLADPGAVASMFWVDSELGSDIYLDGIVSVVDAKHGLQHLTEEKPEGLVNEAARQVALADLIIINKTDLVSGEELNKVRASVRSINGLVKILETQRSRVDLSNVLDLHAFDSLSGISLQKKLENMKTAHAHLDKGIVTVTFEVLGNIKEENLNLFIQNLLWEKNVKDKTGRTMDVIRLKGLVSIQGKSHQVIVQGVHELYDLEETAVAWKEDEKRTNRLVLIGRNLNKEIIKEVFIETVSEKHESS

SEQ ID NO: 7705 - DNA, 1188 bp, Homo sapiens
  CDS (1)..(1188)
atgttaccggctgttggatctgcggatgaggaggaggatcctgcggaggaggattgtcctgaattggttcccatggagacgacgcaaagcgaggaggaggaaaagtctggcctcggcgccaagatcccagtcacaattatcaccgggtatttaggtgctgggaagacaacacttctgaactatattttgacagagcaacatagtaaaagagtagcggtcattttaaatgaatttggggaaggaagtgcgctggagaaatccttagctgtcagccaaggtggagagctctatgaagagtggctggaacttagaaacggttgcctctgctgttcagtgaaggacaatggccttagagctattgagaatttgatgcaaaagaaggggaaatttgattacatactgttagagaccactggattggcagacccaggtgcagtggcttctatgttttgggttgatgctgaattagggagtgatatttaccttgatggtatcataactattgtggattcaaaatatggattaaaacatttaacagaagagaaacctgatggccttatcaatgaagctactaggcaagttgctttggcagatgccattctcattaataaaacagacctggttccagaagaagatgtaaagaaattaagaacgacaattagatccataaatggactaggacaaatcttagaaacacaaagatcaagagttgatctctctaatgtattagatcttcatgcctttgatagtctctctggaataagtttgcagaaaaaacttcagcatgtgccaggaacacaacctcaccttgatcagagtattgttacaatcacatttgaagtaccaggaaatgcaaaggaagaacatcttaatatgtttattcagaatctcctgtgggaaaagaatgtgagaaacaaggacaatcactgcatggaggtcataaggctgaagggattggtgtcaatcaaagacaaatcacaacaagtgattgtccagggtgtccatgagctctatgatctggaggagactccagtgagctggaaggatgacactgagagaacaaatcgattggtcctccttggcagaaatttagataaggatatccttaaacagctgtttatagctactgtgacagaaacagaaaagcagtggacaacacgtttccaagaagatcaagtttgtacataa

SEQ ID NO: 7706 - protein, 395 aa, Homo sapiens
MLPAVGSADEEEDPAEEDCPELVPMETTQSEEEEKSGLGAKIPVTIITGYLGAGKTTLLNYILTEQHSKRVAVILNEFGEGSALEKSLAVSQGGELYEEWLELRNGCLCCSVKDNGLRAIENLMQKKGKFDYILLETTGLADPGAVASMFWVDAELGSDIYLDGIITIVDSKYGLKHLTEEKPDGLINEATRQVALADAILINKTDLVPEEDVKKLRTTIRSINGLGQILETQRSRVDLSNVLDLHAFDSLSGISLQKKLQHVPGTQPHLDQSIVTITFEVPGNAKEEHLNMFIQNLLWEKNVRNKDNHCMEVIRLKGLVSIKDKSQQVIVQGVHELYDLEETPVSWKDDTERTNRLVLLGRNLDKDILKQLFIATVTETEKQWTTRFQEDQVCT

SEQ ID NO: 7707 - DNA, 1038 bp, Mesorhizobium loti MAFF303099
  CDS (1)..(1038): transl_table=11
atgagcgcttccgtcacccgcgtcccctgcactgtcgtcaccggcttcctcggcgccggcaagacgacgctggtccgccatctcctggaaaacgccggcggcaagcgcattgccatcatcgtcaacgagttcggcgacatcggcatcgacggcgagatcttgaagggctgcggcatcgacacctgcccggaggaaaacatcgtcgaactggccaatggctgcatctgctgcaccgtggccgacgatttcgtgccggcgctcgaccagatcctgtcgctcaacccgaaggtcgaccacatcctgatcgaaacctcgggcctggccctgcccaagccgctggtccaggcctttcaatggccaacggtgaagagccgcgtgaccgtcgacggcgtcatcgccgtggtcgatggcccagcgctggccgaaggccgcgtcgccaacgacatggacgccctgcaggcgcagcgtgccggtgatgacagcctcgaccatgacgacccggtcgaggaactgttcgaggaccagatcgcctgcgctgacctgatcatcctgtcgaagagcgacctgatggatgccgccggttcggcccgcgccaacgccatcattggcgaacactccgcccgcgccgtgaagatcgtgtcgacctcgcatggcaaggtggacccctcggtgctgctcgggctcggtctcgcggtcgaggacgatatcgagaaccgcaaatcccatcatgacggcgccttcgaccacgaacatgacgacttcgacaccttcatcgtcgacatcccgtcgatcgccaatccggacgagctggcacaacgcgtcgccgccgccgccgaacaggaaaacgtgctgcgcgtgaaaggcttcgtcgaggtcggcggcaagccgatgcggcttttgctgcaggccgtcggcccgcgcgtcaatcattactatgaccgtgcctggacggccgaagacgaccgccgttcgcgcctggtcgtgatcggcctcaaggggctgaaccgcccggcaatcgagcgtatactcgccggctga

SEQ ID NO: 7708 - protein, 345 aa, Mesorhizobium loti MAFF303099
MSASVTRVPCTVVTGFLGAGKTTLVRHLLENAGGKRIAIIVNEFGDIGIDGEILKGCGIDTCPEENIVELANGCICCTVADDFVPALDQILSLNPKVDHILIETSGLALPKPLVQAFQWPTVKSRVTVDGVIAVVDGPALAEGRVANDMDALQAQRAGDDSLDHDDPVEELFEDQIACADLIILSKSDLMDAAGSARANAIIGEHSARAVKIVSTSHGKVDPSVLLGLGLAVEDDIENRKSHHDGAFDHEHDDFDTFIVDIPSIANPDELAQRVAAAAEQENVLRVKGFVEVGGKPMRLLLQAVGPRVNHYYDRAWTAEDDRRSRLVVIGLKGLNRPAIERILAG

SEQ ID NO: 7709 - DNA, 1308 bp, Mesorhizobium loti MAFF303099
  CDS (1)..(1308): transl_table=11
atgacaaacgacttttggccgcacaggaatcgccgccaaggcgaggcacgcgtgacatcagaggcaccttgctcgccacaaggcgcgctcccgcagtcatccggcatgccgatagcacaagtggcgggccaagagctttggcccatcggtttgccccgtgcaaaagccccgcacacatcctatatggagccgacaatccctttttcgcggcctggatttcaaggcccagtcatctcgaggcaagccatgagcgacgcacagacgcagatccccgtaaccgttctcaccggctatctcggcgccggcaagacgacgctgctcaaccgcatcctgtcggagaaccacggcaggcgctacgcggtcatcgtcaacgaattcggtgaaatcggcatcgacaacgacctgatcgtggaatccgacgaggaaatctacgagatgaacaatggctgcgtctgctgcactgtgcgcggcgacctgatccgtgtcgtcgagggcctgatgcgcaggcccggccgcttcgacgccatcgtggtcgagaccaccggcctcgccgatccggtgccggtggcgcagaccttcttcatggacgacgacgtgcgctccaaaaccaagctcgatgcggtggtggcgctggtcgatgccaagcatttgccgctcaggctcaaggattccaaggaagccgaggaccagattgctttcgccgatgtcgtcgtgctcaacaagaccgatctcgtcacccccgaagagctcgccaaggtcgaggcgaccatccgcgccatcaacccggcggcgaagatccatcgcaccacccgcgccggcgtcgccctgtcggaagtgctcgaccgcggcgccttcgacctctcccgtgcactggaaaatgacccgcatttcctcgaaggtcatgacgatcacgaccatcatgaccacgaccaccacgatcacgatggccaccatcaccatgatcatgacgggcacgaccatcaccatcacgaccatccctccgacatccatgacgtgacggtgcagtcggtgtcgttgcgcggcggcgagatggacccgaagaaattcttcccatggatcgagaagatcacccagatggaaggccccaacatcctgcggctgaagggcatcattgcactcaagggcgatgatgaacgctacgtcatccagggcgtgcacatgatcatagagggcgaccatcagcgcgcctggaaagacggcgagaaacatgaaagccggctcgtgttcatcggccgcgaactcgacgccgagcggctgaagaagagttttgacgcctgccaggcctag

SEQ ID NO: 7710 - protein, 435 aa, Mesorhizobium loti MAFF303099
MTNDFWPHRNRRQGEARVTSEAPCSPQGALPQSSGMPIAQVAGQELWPIGLPRAKAPHTSYMEPTIPFSRPGFQGPVISRQAMSDAQTQIPVTVLTGYLGAGKTTLLNRILSENHGRRYAVIVNEFGEIGIDNDLIVESDEEIYEMNNGCVCCTVRGDLIRVVEGLMRRPGRFDAIVVETTGLADPVPVAQTFFMDDDVRSKTKLDAVVALVDAKHLPLRLKDSKEAEDQIAFADVVVLNKTDLVTPEELAKVEATIRAINPAAKIHRTTRAGVALSEVLDRGAFDLSRALENDPHFLEGHDDHDHHDHDHHDHDGHHHHDHDGHDHHHHDHPSDIHDVTVQSVSLRGGEMDPKKFFPWIEKITQMEGPNILRLKGIIALKGDDERYVIQGVHMIIEGDHQRAWKDGEKHESRLVFIGRELDAERLKKSFDACQA

SEQ ID NO: 7711 - DNA, 1347 bp, Arabidopsis thaliana
  CDS (1)..(1347)
atggcgacgctgttgaaactcgacatagccacgactttccttgctttcatcgttccccgagctaatacctccttgaaccatcggttcgcttctgctaggctcagtacagccacagtttccctcagaacgaagtcgtcatcgttctattccgcggcgctttactctgacagccgtcggagattccactccgccgttgcctctgattcctcgctcgccgttgtagatgatgaagatatcttcgatgttgccagtgagattttgcccgacaatcgaattccggccactataatcaccgggttcctgggctctggtaagacaacattgctaaaccatatattgacgggagatcatgggaagcgcatagccgtgattgagaacgagtttggtgaagtcgacattgatggatcacttgtggcagctcaaactgcgggagcggaggatataatgatgcttaacaatggctgtctgtgttgtactgttaggggtgatcttgtgaggatgatttctgaaatggtccagaccaagaaaggaaggttcgaccatatcgttattgagacgacaggattggctaaccctgctccgattattcaaactttctatgctgaggatgaaattttcaatgatgtcaagctggatggggttgtcactctggttgatgctaaacatgctcgtttgcatctagatgaggtcaaacctgaaggctatgtcaatgaggcggttgaacaaatagcttacgcggatcgtatcattgttaacaagactgatcttgttggtgagccagaactagcttcagtgatgcagcggataaagaccataaacagcatggctcacatgaagcggacaaagtatgggaaggttgacttggattatgttcttggaattggagggtttgatctagaaagaattgaaagctctgtgaatgaagaagagaaagaagatcgcgagggtcatgatgatcatcaccatggtcatgactgccatgatcaccacaatgagcatgagcatgagcatgaacacgagcatcaccattctcatgatcacacccatgaccctggtgttggttcagtcagtatagtttgcgaaggagacttagacctcgagaaggctaacatgtggcttggggcgctattgtaccaacgtagtgaggatatctacagaatgaaaggtatcctctccgtacaagacatggacgagagattcgtgtttcagggagttcatgaaatatttgaaggatcacctgaccggttatggagaaaagatgaaacaagaaccaacaagattgttttcatcggcaagaatttgaaccgggaggagttagagatgggtttcagagcttgcttgatttga

SEQ ID NO: 7712 - protein, 448 aa, Arabidopsis thaliana
MATLLKLDIATTFLAFIVPRANTSLNHRFASARLSTATVSLRTKSSSFYSAALYSDSRRRFHSAVASDSSLAVVDDEDIFDVASEILPDNRIPATIITGFLGSGKTTLLNHILTGDHGKRIAVIENEFGEVDIDGSLVAAQTAGAEDIMMLNNGCLCCTVRGDLVRMISEMVQTKKGRFDHIVIETTGLANPAPIIQTFYAEDEIFNDVKLDGVVTLVDAKHARLHLDEVKPEGYVNEAVEQIAYADRIIVNKTDLVGEPELASVMQRIKTINSMAHMKRTKYGKVDLDYVLGIGGFDLERIESSVNEEEKEDREGHDDHHHGHDCHDHHNEHEHEHEHEHHHSHDHTHDPGVGSVSIVCEGDLDLEKANMWLGALLYQRSEDIYRMKGILSVQDMDERFVFQGVHEIFEGSPDRLWRKDETRTNKIVFIGKNLNREELEMGFRACLI

SEQ ID NO: 7713 - DNA, 906 bp, Arabidopsis thaliana
  CDS (1)..(906)
atgctgaaggaagaagctgagggagtgaaaatggaagatgatgatgaagaaccaccgatggctgttcaaatccatccggatgtttctgtcggaaaggttcactcatcaagcgatactgtttcagttggtgtgtctgttatcactggctatctcggcgcgggaaaatccactcttgtgaattatatattgaacgggaaacacgggaagagaatagctgtgattttgaatgagtttggggaagagattggagttgagagggctatgattaacgaaggagaagaaggtgccattgttgaagaatgggttgagctcgctaatggctgtgtttgttgtactgtcaagcatagtcttgttcaagctctcgagcagcttgttcagagaaaagacaggcttgatcatatattattggagacaacaggtttagcaaacccagctccattggcttctattctttggttggatgaccagttagaatcagaagtcaagcttgactgtattgttactgtcgtggatgcaaagaatcttcgttttcagctcaatgagcgtcgtgactcatcctcgtttcctgaggcctttaatcaaatagcatttgcggacacgataataatgaacaaggtggacttgatttctcaagaggagtctgatgaattagagaaggagattcattccatcaactcgctcgccaatgtcatccgatctgttaggtgccaagttgatttgtccaatatattaaactgccaggcatatgattcaactgttcgtttatggctggaggaaattctgtgggataaaaaatcggagatggatgtataccgttgcaaggctgtgttgagcattcaaaactcagaccagatgcatattttgcaggacacaaactggatgaagaagttctcagaagcggattaa

SEQ ID NO: 7714 - protein, 301 aa, Arabidopsis thaliana
MLKEEAEGVKMEDDDEEPPMAVQIHPDVSVGKVHSSSDTVSVGVSVITGYLGAGKSTLVNYILNGKHGKRIAVILNEFGEEIGVERAMINEGEEGAIVEEWVELANGCVCCTVKHSLVQALEQLVQRKDRLDHILLETTGLANPAPLASILWLDDQLESEVKLDCIVTVVDAKNLRFQLNERRDSSSFPEAFNQIAFADTIIMNKVDLISQEESDELEKEIHSINSLANVIRSVRCQVDLSNILNCQAYDSTVRLWLEEILWDKKSEMDVYRCKAVLSIQNSDQMHILQDTNWMKKFSEAD

SEQ ID NO: 7715 - DNA, 1335 bp, Arabidopsis thaliana
  CDS (1)..(1335)
atggcgacgctatcaacactagagattgctacgaccttcctctctttcaccgctcctcgttcctctgccgccttcaactatcgcttttcttctgccgccgtctctgttctctccaggcccagagctaccaccgtttccgtcagaacgacgccgtctttcttctattccccggtggtccgccgtcaaagattctcatctgtctccgcctcagctacgcagactgaagattctgatgtcaccactaagattccgccagataaccggattccggctactattatcaccggttttttgggctctggcaagacaacattgctgaatcatatactgaccagagatcatgggaagcgaatagccgtgattgagaatgagtttggtgaagttgacattgatgggtcacttgttgcttctaaatctattggagctgaggatattgtgatgctcaacaatggctgcctttgttgcactgttaggggtgatcttgtcaggatgattggagaattagtcaataccaagaaaggaaagttcgatcatatagtcatagagactacaggattggcaaacccggcaccgattatccaaaccttttatgccgaggaagaaattttcaatgatgtcaaactggacggtgttgttactctagttgatgctaagcatgctcgtttgcatctagacgaggtcaaacccgaaggtgttgtcaatgaggctgttgaacaaatagcttatgcagatcgtatcatagttaacaagactgatcttgttggtgaggcggaattaggttcggtggtacaacgcataaagacaataaacagcatggctcagatgacgcgaacaaagtacggaaatgttgacttagattatgttcttggaattggaggttttgatctagagagaatcgaaagctctgtgaatgaagatgataagggagatcaccatgatcacgaccatgatcatcatcatgatcacaaccatgaccacgaccatcatcaccacgatggacatgatcatcatcatcattctcatgatcacacccatgatcccggtgtttcttcagtcagtatagtttgcgaaggaagcttagaccttgagaaggcaaacatgtggctcgggacgttactgatggaacgcagtgaagacatctacagaatgaaaggtctcctctcggtccacaccatggaggagagattcgtgtttcaaggagtccatgacatatttcaaggatcaccagacaggttatggggaagagaggaggagagagtgaataagatcgttttcattggtaagaatttgaacagggaggagttagagaagggttttaaagcttgcttgatttga

SEQ ID NO: 7716 - protein, 444 aa, Arabidopsis thaliana
MATLSTLEIATTFLSFTAPRSSAAFNYRFSSAAVSVLSRPRATTVSVRTTPSFFYSPVVRRQRFSSVSASATQTEDSDVTTKIPPDNRIPATIITGFLGSGKTTLLNHILTRDHGKRIAVIENEFGEVDIDGSLVASKSIGAEDIVMLNNGCLCCTVRGDLVRMIGELVNTKKGKFDHIVIETTGLANPAPIIQTFYAEEEIFNDVKLDGVVTLVDAKHARLHLDEVKPEGVVNEAVEQIAYADRIIVNKTDLVGEAELGSVVQRIKTINSMAQMTRTKYGNVDLDYVLGIGGFDLERIESSVNEDDKGDHHDHDHDHHHDHNHDHDHHHHDGHDHHHHSHDHTHDPGVSSVSIVCEGSLDLEKANMWLGTLLMERSEDIYRMKGLLSVHTMEERFVFQGVHDIFQGSPDRLWGREEERVNKIVFIGKNLNREELEKGFKACLI

SEQ ID NO: 7717 - DNA, 966 bp, Helicobacter pylori 26695
  CDS (1)..(966): transl_table=11
atgcccaaaatccctatcacgctcatcaccggttttttaggcagcggtaaaacgagttttttgagcgaatatttaaaccaaacagatcaccaaggcgtcgctcttatcatcaatgaaatcggtcaagccgctttggatcagcgcatcttaagcgttcaatattgcggtgaaaaaatgctctatcttaacgcagggtgcgtgtgttgcaacaaacgcttggatttagtggagtctctaaaagccacgctcaacaactatgaatggcacggcgaaattctaaggcgcatcatcattgaaactaccggtttagccaacccggcaccgattttatggacgattttgagcgacacttttttaggagtgcattttgagattcaaagcgtggtggcttgcgtggatgcattgaatgctagagagcatttaaccaacaatgaagctaaagagcaaatcgtttttgctgatagcgttttattgaccaaaacggatttacaaaacgatagcgcggctttaacaaaactaaaagagaggatacaagcccttaaccctagtgcagaaatttttgacaagagggcgatagactatgagagcctcttttcacgcaaaaatagggcgcgaaattttatgccaagaatgccaaaagattcgcactcgcaaggctttgagactttaagcattaattttgaaggcacgatggagtggagcgcgtttgggatttggctgagtttgttattgcatcaatacggcacacagattttacgcatcaaggggattattgacattggaagcggctttttggtgagtattaacggcgtgatgcatgtcatttacccgcctaagcatattttaaaggatcaaaacggctctaacctcgtttttatcatgcgccatttagagcgtgaaaaaatcttaaattccttaaagggttttaaggattttctcggcatcaagggttttgaaacccaataa

SEQ ID NO: 7718 - protein, 321 aa, Helicobacter pylori 26695
MPKIPITLITGFLGSGKTSFLSEYLNQTDHQGVALIINEIGQAALDQRILSVQYCGEKMLYLNAGCVCCNKRLDLVESLKATLNNYEWHGEILRRIIIETTGLANPAPILWTILSDTFLGVHFEIQSVVACVDALNAREHLTNNEAKEQIVFADSVLLTKTDLQNDSAALTKLKERIQALNPSAEIFDKRAIDYESLFSRKNRARNFMPRMPKDSHSQGFETLSINFEGTMEWSAFGIWLSLLLHQYGTQILRIKGIIDIGSGFLVSINGVMHVIYPPKHILKDQNGSNLVFIMRHLEREKILNSLKGFKDFLGIKGFETQ

SEQ ID NO: 7719 - DNA, 879 bp, Aquifex aeolicus VF5
  CDS (1)..(879): transl_table=11
atgatttcagcgtttgttgttacgggatttctcggaagcggtaagacgagtctgataataaactccgtaaaggagcaccttaaagataaaaaggtcgcgatagttgtaaacgagttcggagaggtaggagtagacggaaagatacttaaaaacgtttactccgaagttctggagctttccgaaggctgtatttgttgcaaactgagtgcggaatttgagagttcggtccggaggctcattcaggactacaacccggaagttcttatcgtagagacctccggcgtagcggagccgtttcccatagtgttcagtttaaagactctagggctcttcgtggacggagttatatgcgttattgactctaaaaactttccgaagtacaaagaggacgacaccgcaaagtaccagctcgcaacctcaaacgtagtcgttttaaacaagacagatttagtttcaaaggaagagctggagaaagtaaaggaagaagtgaaaaagataaaggaaaagtacaaagtggtgaacatgttctccccggaagagaaggaaagcttttacaaaatttacgaagctacttatggaaaagttccagcggaagtattcaaaggtgtcggaaaacccgtagagctaaaggaacaccttcactttcactcccatgacagcagaaaggaagaagttgtaacctttgacagagaacttacggaagaagaactcgtgaacttcctgaaaaacctgccaaaggaagttatacgtgcaaagggaattgttaagttaaaggactacccctttcccgtattcgtccactacgtcttcggagattacgactacggaatgcccgcggaaaattacgaaggagagtctttcttggttctaataagatga

SEQ ID NO: 7720 - protein, 292 aa, Aquifex aeolicus VF5
MISAFVVTGFLGSGKTSLIINSVKEHLKDKKVAIVVNEFGEVGVDGKILKNVYSEVLELSEGCICCKLSAEFESSVRRLIQDYNPEVLIVETSGVAEPFPIVFSLKTLGLFVDGVICVIDSKNFPKYKEDDTAKYQLATSNVVVLNKTDLVSKEELEKVKEEVKKIKEKYKVVNMFSPEEKESFYKIYEATYGKVPAEVFKGVGKPVELKEHLHFHSHDSRKEEVVTFDRELTEEELVNFLKNLPKEVIRAKGIVKLKDYPFPVFVHYVFGDYDYGMPAENYEGESFLVLIR

SEQ ID NO: 7721 - DNA, 966 bp, Helicobacter pylori J99
  CDS (1)..(966): transl_table=11
atgcccaaaatccctatcacgctcatcaccggttttttaggcagcggtaaaacgagttttttaagcgaatatttaaaccaaatagatcaccaaggcgtcgctctcatcatcaatgaaatcgggcaagccgctttggatcagcgcatcttaagcgttcaatattgcggtgaaaaaatgctctatcttaacgcagggtgtgtgtgttgcaataaacgcttagatttagtggagtctctaaaagccacgctcaataactatgaatggcgcggcgaaattctaaagcgcgtcattattgaaaccaccggtttagccaatccggcgccgattttatggacgaatttgagcgatgtttttttaggggcgcattttgaaattcaaagcgtggtggcttgcgtggatgttttgaacgctaaaacgcatttaacaaacaacgaagctaaagagcaaatcgtttttgctgatagcgttttattgaccaaaacggatttgcaaaacgacagcacggctttaatgaaattaaaagagcgaatacaatcccttaaccctagcgcagaaatttttgacaagaaaaatatagattacgaaagctttttttcacgcaaaaatggggcgcgaaatttcatgctaagaatgccaaaagattcgcactcgcaaggctttgagactttaagcgttagttttgaaggcacgatggaatggagcgcgtttgggatttggctgagtttgttgttgcatcaatacggcacgcagattttacgcataaaggggattattgacattggaagcgatcttttagtgagcattaacggcgtgatgcatgtgatttacccgcccaagcacattttaaaggatcaaaacggctctaacctcgtttttattgtgcgccatttagggcgtgaaaaaatcttaaattccttaaagggttttaaggattttctcggcatcaagggttttgaaaccccataa

SEQ ID NO: 7722 - protein, 321 aa, Helicobacter pylori J99
MPKIPITLITGFLGSGKTSFLSEYLNQIDHQGVALIINEIGQAALDQRILSVQYCGEKMLYLNAGCVCCNKRLDLVESLKATLNNYEWRGEILKRVIIETTGLANPAPILWTNLSDVFLGAHFEIQSVVACVDVLNAKTHLTNNEAKEQIVFADSVLLTKTDLQNDSTALMKLKERIQSLNPSAEIFDKKNIDYESFFSRKNGARNFMLRMPKDSHSQGFETLSVSFEGTMEWSAFGIWLSLLLHQYGTQILRIKGIIDIGSDLLVSINGVMHVIYPPKHILKDQNGSNLVFIVRHLGREKILNSLKGFKDFLGIKGFETP

SEQ ID NO: 7723 - DNA, 990 bp, Vibrio cholerae O1 biovar eltor str. N16961
  CDS (1)..(990): transl_table=11
atgatcaatcgagttccgaccaatattattacgggttttctgggcgttggaaaaaccaccgcgattttgcacctgctagccacgaaacctgcgcatgaaaaatgggctgtactcgttaatgagttcggtgagattggcattgatggtgccatcatgagcgagcagggtgcgatgatcaaagaagtaccggggggatgtctgtgctgtacggctggggttccaatgtctgttggcattaacgccttgttgcgtcaaaagcccgatcgtttaatcatcgaacccacaggattagggcatcctaagcaagtagtcgccacgttaatttctgagcagtatcagccttatgtggacttaaaagccacgattgcgttgatggatccacgccacttgagcatggataaataccgcagtaaccaaaatttcaacgaccaactggcgagcgcggatattgttttggggaacaaagtcgatcagtgcagcagtagtgacattgatgcctttaatgattgggttacggatcaaacgccggccaaaacctttagtcagctcatcaagcaagggcaattccctatagagttactggatatgccgcgtttagttggtcatgcatccactcatattgactcccatcatcatcaccatgctgccgatgagccgcaatttcagcttgcacctcaacagccatttttgcgcaaagaaaatcgcggccaaggctattttagttgtggttggttgtttggtgcggagtaccagtttaacttcgatctgttgtttcaactgctgaatgatttaaccgccgagcgagtgaaaggggtgctgaataccgatcgtggttgctacgctttcaacgtggcgaatggcgtggtttctgtgactgaaatgagcttagacggttttgaatcgcgcttagaagtgattgattcacaactgatgccttggagcgagttagaaagcatactgctcaagattgcaggcattccacaggcgtaa

SEQ ID NO: 7724 - protein, 329 aa, Vibrio cholerae O1 biovar eltor str. N16961
MINRVPTNIITGFLGVGKTTAILHLLATKPAHEKWAVLVNEFGEIGIDGAIMSEQGAMIKEVPGGCLCCTAGVPMSVGINALLRQKPDRLIIEPTGLGHPKQVVATLISEQYQPYVDLKATIALMDPRHLSMDKYRSNQNFNDQLASADIVLGNKVDQCSSSDIDAFNDWVTDQTPAKTFSQLIKQGQFPIELLDMPRLVGHASTHIDSHHHHHAADEPQFQLAPQQPFLRKENRGQGYFSCGWLFGAEYQFNFDLLFQLLNDLTAERVKGVLNTDRGCYAFNVANGVVSVTEMSLDGFESRLEVIDSQLMPWSELESILLKIAGIPQA

SEQ ID NO: 7725 - DNA, 936 bp, Bacillus halodurans C-125
  CDS (1)..(936): transl_table=11
atgaaaacgaaaccgattgatctttacatcctgagtggttttttagggagcggaaaaagtacgttattgaaacgattaattgaacaagagcaagctaggggcaacaaaatcggggttttgatgaatgaactgggagaggtcagtgtcgattcctccattgtacctaaggatactccgttaaaagaaatgttaaacggttgtatttgctgcacaattcaaggggagcttagcgcccagctccaatcatttatcgaggagtatgagcttgatgttattttcattgaagcgacaggggcggcccatcctcttgaagtggtagaggcttgtactcatcctgtttttgcgggtcaggttagagtgagaggggtactaacggttgtgaatgctcgccaatggattgagggaaagatgagcatcaaaataaaaaagcttatggaggcacaagtgacgtttgccgatctcatcgtcgttaacaaagttgatcaagtgacagatgcgcaggtagagcagctcacaacaagtataaaagacttgaatccgaaagcgattaatataccgacaactttctcaaatctagagcctgttcattcggagaggcttcatcatgctgccgctccctcttcaagaggctctgaaagcaaagcccatgtgcatgagcatttacatttacggacgatggccgttccgattcaacatcctgtggatcgaatggaattgctttcatttttaaaaggaattcaaggacagatttaccgagtgaaagggttcattcatctgaaggagtcaccggggctgtttttattcaactacgcttatggtgatccgatgtttgaacggcatcggactgatcaggcgtatgcaccggtccttgtttttatcggagatgacctcgatcatcaggcgattgaagagggcttacagcaattacaacaataa

SEQ ID NO: 7726 - protein, 311 aa, Bacillus halodurans C-125
MKTKPIDLYILSGFLGSGKSTLLKRLIEQEQARGNKIGVLMNELGEVSVDSSIVPKDTPLKEMLNGCICCTIQGELSAQLQSFIEEYELDVIFIEATGAAHPLEVVEACTHPVFAGQVRVRGVLTVVNARQWIEGKMSIKIKKLMEAQVTFADLIVVNKVDQVTDAQVEQLTTSIKDLNPKAINIPTTFSNLEPVHSERLHHAAAPSSRGSESKAHVHEHLHLRTMAVPIQHPVDRMELLSFLKGIQGQIYRVKGFIHLKESPGLFLFNYAYGDPMFERHRTDQAYAPVLVFIGDDLDHQAIEEGLQQLQQ

SEQ ID NO: 7727 - DNA, 963 bp, Bacillus halodurans C-125
  CDS (1)..(963): transl_table=11
atgattccagtctatttgttttctggctttttaggaagtgggaaaacgacggttttactaaacgtattgaaccaactaaaagaagatgggcttaggccagcgatcgtgttaaatgaagcaggcgaaatgaatgtggagaaagagctttttgcaaatgaaactgtagtggaactcctaaatggttgcatttgttgtacgatccaagatgatttgaaggcagagctccaacgatttttaaccattaatgatcgcagtgtcgatgttctacttatcgaaggaacgggtatcgccaatcctcgggaaatcatagaggtactaacagatccaccatttatcgaacaacttgcactccaatcagtgatcggaatcattgatgctagtcgctatttggaatatcgcagtttattttcaagctcaaaagaaattcgagctgtcttaaaagagcaagtggctgaaagcactttactacttctaaataaacaagatttagtggacggtcggaccttacacaaggttgaagagaaattgaaaaaggataagaaaccgggagccaccattttgttttgctcatacgggaaagtaccgacggaggagttattaaagccacgaatcaaagtggatactgggaaggatcatgcttattccggtgaagcctcttcccatgctagtcattcgcaccaccaccatcatcatgatattcaagcaattaagcttgatcttgaacaaccggtaaccgaaaaagagcttcaacgatggttaattgaccaaggggatcagctcattcgcgcaaaagggtatgttcgcctgcaagggaacgacctactcgtccattttcaatatgcgtcaaagcagctttccgtccgcaagagcaaggaagaagtacctccgtgcttaatcctaattggtgttgatttaaatcgagaaactttggctaaatcgttgcatactgtaacgaacgtttaa

SEQ ID NO: 7728 - protein, 320 aa, Bacillus halodurans C-125
MIPVYLFSGFLGSGKTTVLLNVLNQLKEDGLRPAIVLNEAGEMNVEKELFANETVVELLNGCICCTIQDDLKAELQRFLTINDRSVDVLLIEGTGIANPREIIEVLTDPPFIEQLALQSVIGIIDASRYLEYRSLFSSSKEIRAVLKEQVAESTLLLLNKQDLVDGRTLHKVEEKLKKDKKPGATILFCSYGKVPTEELLKPRIKVDTGKDHAYSGEASSHASHSHHHHHHDIQAIKLDLEQPVTEKELQRWLIDQGDQLIRAKGYVRLQGNDLLVHFQYASKQLSVRKSKEEVPPCLILIGVDLNRETLAKSLHTVTNV

SEQ ID NO: 7729 - DNA, 1188 bp, Bacillus halodurans C-125
  CDS (1)..(1188): transl_table=11
atgaacataggaaaaatacctgtaacggtgttaagcggttatttaggagccggaaaaacaacggtgttaaatcatgtgctggccaataaagaggggatgaaggtggcggtcatcgtcaatgacatgagcgaagttaatattgatgccactcttgtcaaacaaggagggtttactcgaaccgatgagaagcttgtggaattacaaaacggctgtatttgctgcacactccgagaagatttaattattgaagtggaaaagcttgcgcggctcgggaatattgattacatcctaatcgaatccactggaatctctgaaccgattccggttgcacaaacgttcacttatcttgatgaagaactgggaatacatttaggggaccgttgtacactcgatacgatggtgactgtcgttgatgccaaccgcttttgggaggattatgagtcaggggagagtcttctggatcgtaagcaaacggatgatgaggcggatacacgggaagttgtcgatttacttattgaccaaattgaattcgccaacgtcattctcttgaataaagtagatcttgtcgaggaagatgacgtacgggaactgactgctgttttacacaaattaaatccagaggctgagattttgccagtttcccacggtcgtgtagacttgaaccgcatattgcatacaggtctgtttgattttgataaggcaagccaaggtgctggctggattaaggaattaaatgaggagcacacccccgaaacagaagaatatggaatttcatcgtttgtgtataaacggcagcggccgtttcatcctgaacgatggatggaatggttggagaattggccgcaagaggtagtgcgtgcgaaaggcttcttttggctagcgacgcgcaacgaaatggcagggcttatttctcaggccgggacttcgattgtcattcaaggagctggactctgggtcgcagcttatgataaagaagagcaacaacaagtgttggctgaagaaccagagttagctgcgcgctggcaccgtaagtacggggatcgaatgaatgagcttgtctttattggacttgatatggatcgaaaggaaatcgagaaaagtcttgacacctgtttattaacagacgaagagttgggacaagactggtctgccttaccagatcctctgccatcgtttactgaacagtaa

SEQ ID NO: 7730 - protein, 395 aa, Bacillus halodurans C-125
MNIGKIPVTVLSGYLGAGKTTVLNHVLANKEGMKVAVIVNDMSEVNIDATLVKQGGFTRTDEKLVELQNGCICCTLREDLIIEVEKLARLGNIDYILIESTGISEPIPVAQTFTYLDEELGIHLGDRCTLDTMVTVVDANRFWEDYESGESLLDRKQTDDEADTREVVDLLIDQIEFANVILLNKVDLVEEDDVRELTAVLHKLNPEAEILPVSHGRVDLNRILHTGLFDFDKASQGAGWIKELNEEHTPETEEYGISSFVYKRQRPFHPERWMEWLENWPQEVVRAKGFFWLATRNEMAGLISQAGTSIVIQGAGLWVAAYDKEEQQQVLAEEPELAARWHRKYGDRMNELVFIGLDMDRKEIEKSLDTCLLTDEELGQDWSALPDPLPSFTEQ

SEQ ID NO: 7731 - DNA, 1128 bp, Pseudomonas aeruginosa PAO1
  CDS (1)..(1128): transl_table=11
gtggcgaatccgttgcgcggcccctgcgtccgcgccactcgtccgcatgcccgccgagctgaacaagggctgcccatgaaaaccctggcgaaactccccgtcaccatcgtcaccggcttcctcggcgccggcaagaccaccttgctccggcacatgctggacaacgccgaaggccggcgcatcgcggtgatcgtcaacgagttcggcgaactcggcatcgacggcgagatcctcaagcaatgttccatcggctgcagcgaagaagaggcgcagggccgcgttttcgagctggccaacggttgcctgtgctgcaccgtgcaggaagagttcttcccggtgatgcgcgagctggtggcgcgccgcggcgaccttgaccagatcctcatcgagaccagcggcctggccctgcccaagccgctggtgcaggctttccagtggccggaaatccgcaacgcctgcacggtcgacgcggtgatcaccgtggtcgacagtccggcggtggcggccggtaccttcgccgcccatcccgagcaggtggaccagcaacgccgccaggaccccaacctcgaccatgaatcgccgctgcacgaactgttcgaggaccagttggccagtgccgacctggtgatcctgaacaaggccgaccagctcgacgccgaggccctggcgcgggtccgcgcggagatcgccggggagctgccggcggcggtgaagatcgtcgaggcgagccggggcgagctgccgctgccggtcttgctgggactcaacgccgaggccgagctgcacatcgacggccggccgacccaccacgaccacgaaggccacgaggaccacgaccacgacgagttcgactccttccacgtcgatctccccgaggtggaggaagctgcgctgctcgaggccctcggcgagctggtggagcgtcacgacatacttcgcatcaagggtttcgccgccattccgggcaagcccatgcgcctgttggtacagggcgtcggcaagcgcttcgacaggcatttcgaccgcaagtggctggccgacgaagcccgcagcacccggctggtggtgatcggccaggagctggaccaggccgccattgccaaccagctgcgcacagcgcttgcctga

SEQ ID NO: 7732 - protein, 375 aa, Pseudomonas aeruginosa PAO1
MANPLRGPCVRATRPHARRAEQGLPMKTLAKLPVTIVTGFLGAGKTTLLRHMLDNAEGRRIAVIVNEFGELGIDGEILKQCSIGCSEEEAQGRVFELANGCLCCTVQEEFFPVMRELVARRGDLDQILIETSGLALPKPLVQAFQWPEIRNACTVDAVITVVDSPAVAAGTFAAHPEQVDQQRRQDPNLDHESPLHELFEDQLASADLVILNKADQLDAEALARVRAEIAGELPAAVKIVEASRGELPLPVLLGLNAEAELHIDGRPTHHDHEGHEDHDHDEFDSFHVDLPEVEEAALLEALGELVERHDILRIKGFAAIPGKPMRLLVQGVGKRFDRHFDRKWLADEARSTRLVVIGQELDQAAIANQLRTALA

SEQ ID NO: 7733 - DNA, 1005 bp, Pseudomonas aeruginosa PAO1
  CDS (1)..(1005): transl_table=11
atgtccgaagtagccaacgacaaccacgccccgatccccgtcaccgtgctcaccggcttcctcggcgccggcaagaccaccctgctcaagtacctgctgcaggccgagcacggcatgaagatcgcggtgatcgagaacgagtacagcgagacgccgatcgacggccagttgctcggcgtcgagccggtgcaggtgatgacgctgtccaatggctgcgtctgctgctcgatcaacaccgacctggaaaaggccctgttcctcctgctggagcgccgcgacaacggcgaaatcgacttcgaccgcctggtgatcgagtgcaccggcctggccgatccggcgccggtggcgcagaccttcttcgccgacgaggaactctgccagcgctacgtgctggacggcatcatcaccctggtggacgccgccaacgccgagcgtcacctgcaggaaaccatcgcccaggcccaggtcggcttcgccgaccgcatcctggtgagcaagaccgacctggtcgacgccgccaccttcgaggccctgggccagcgcctgcaacggatcaaccggagggcgctggtgcatgtggtcgagcacggccgcatcgacctggcgcacctgctcgacgtacgtggcttcaacctcaacgccgacctcggtcctggcatcggcctgcgcccgctgcgagcggtggcagccaaggacagccgcgatcgcatcggcaccctggtactgcgcagcgacacgccgctcgatctcgaaaggctgagcgagttcatggacgacctgttgcagtggcatggcaattccctgctgcgctacaagggcgtgctgaacatcgccgacgagccgcgtcgcctggtgttccagggcgtgctgcgactctacggcttcgactgggatagcgagtggcgggacgacgaggcgcgcgagagcgtgatcgtgttcatcggcgacaacctgccggaggacagtatccgcgagggcttcgaacgcatcgtcgaaggccgctga

SEQ ID NO: 7734 - protein, 334 aa, Pseudomonas aeruginosa PAO1
MSEVANDNHAPIPVTVLTGFLGAGKTTLLKYLLQAEHGMKIAVIENEYSETPIDGQLLGVEPVQVMTLSNGCVCCSINTDLEKALFLLLERRDNGEIDFDRLVIECTGLADPAPVAQTFFADEELCQRYVLDGIITLVDAANAERHLQETIAQAQVGFADRILVSKTDLVDAATFEALGQRLQRINRRALVHVVEHGRIDLAHLLDVRGFNLNADLGPGIGLRPLRAVAAKDSRDRIGTLVLRSDTPLDLERLSEFMDDLLQWHGNSLLRYKGVLNIADEPRRLVFQGVLRLYGFDWDSEWRDDEARESVIVFIGDNLPEDSIREGFERIVEGR

SEQ ID NO: 7735 - DNA, 927 bp, Neisseria meningitidis Z2491
  CDS (1)..(927): transl_table=11
atgtcagaagtgaaaaaaaccaaagtccacctgatttcaggttttctgggaacaggcaaaaccaccgcgctcaaaagcctgatggcgcaaaaagacccgaacgaaaaatgggtcatcatcgtcaacgagttcggcgaaatcggtattgacggcgcggtattgagcgacaacggcatccctgtggcagaaatcgccggcggctgtttgtgttgcaccgccggcccgcaaatgggcgtaaccgtgcagaaaatgctgcgcgacgccaagcccgaccgcctgatgattgaagcaagcggactggctcacgcagccagcgtcatcgacgaactcaaagccaaaccgctggacagccttttggaaatcggcgccgtctttaccgtcgtcaatccgcgccagttcatcaaccccgattacgcgcaacaggcgttgtataaagaccaaatcggcatctgcgacgtattggtcgccagcaaaaccgatttatgcaccaccgaacagcttgccgaatttcacgacaaagcggcaaaactgttcccgcccaaagccaaagtggtcgaagtccaaaacgcacaactcgacatccggtggctcgatattcccgtcatcgaaaaatcacgctaccgcctcaaagccctgccggacaacaccatgggcttccagtcgcaaggtttcacattccccgccggacgcgatttcgacggcgaaaagctgaccaactttttcaacgacctgcccaaaatgaccgaaggactcgtccgcgccaaaggcgtgtttcaagtattgggaacgtgggtgtggctcaactgggtagacggacagtggggcgcgaaccaagtctcatggcggcgcgattcgcgttttgaattgattgccaaatcgtttgatgcggatttaatcgaacaaaagctcaaagacgcattggaatag

SEQ ID NO: 7736 - protein, 308 aa, Neisseria meningitidis Z2491
MSEVKKTKVHLISGFLGTGKTTALKSLMAQKDPNEKWVIIVNEFGEIGIDGAVLSDNGIPVAEIAGGCLCCTAGPQMGVTVQKMLRDAKPDRLMIEASGLAHAASVIDELKAKPLDSLLEIGAVFTVVNPRQFINPDYAQQALYKDQIGICDVLVASKTDLCTTEQLAEFHDKAAKLFPPKAKVVEVQNAQLDIRWLDIPVIEKSRYRLKALPDNTMGFQSQGFTFPAGRDFDGEKLTNFFNDLPKMTEGLVRAKGVFQVLGTWVWLNWVDGQWGANQVSWRRDSRFELIAKSFDADLIEQKLKDALE

SEQ ID NO: 7737 - DNA, 855 bp, Escherichia coli O157:H7 EDL933
  CDS (1)..(855): transl_table=11
gtgattgaaaacgaatttggcgaagtctccgttgatgatcaactgattggcgaccgcgccacgcagatcaaaacgctgaccaacggctgcatctgctgttcgcgctccaacgagctggaagacgcactactcgacctgctggataatctcgataagggcaatattcagttcgatcgtctggtcattgaatgcaccggcatggccgatcccggcccgattattcagacctttttctcccatgagattttatgccagcgttacctgctggacggcgtgattgcgctggtggatgcggtacatgccgatgagcagatgaaccagttcaccatcgcccagtcccaggttggctacgccgaccgtattctgctgaccaaaaccgacgtcgcaggcgaagcagaaaaactgcgcgaacgcctggcgcgcatcaacgcccgtgcaccggtctacaccgttacccacggcgacatcgacctgggcctgctgttcaacaccaacggttttatgctggaagaaaacgtcgtcagcaccaaaccgcgtttccactttatcgcggataaacaaaacgatatttcgtcgattgtggtagaactggattacccggtagatatcagcgaagtttcccgcgtgatggaaaacctgctgctggaatcggcggataaactgctgcgttacaaagggatgctgtggattgacggcgaacctaaccgcctgctgttccagggcgtccagcgcctctacagcgccgactgggaccgcccgtggggcgatgaaaaaccgcatagcacaatggtttttatcgggattcagttgccggaggaagagattcgggcagcgtttgcggggttgaggaagtaa

SEQ ID NO: 7738 - protein, 284 aa, Escherichia coli O157:H7 EDL933
MIENEFGEVSVDDQLIGDRATQIKTLTNGCICCSRSNELEDALLDLLDNLDKGNIQFDRLVIECTGMADPGPIIQTFFSHEILCQRYLLDGVIALVDAVHADEQMNQFTIAQSQVGYADRILLTKTDVAGEAEKLRERLARINARAPVYTVTHGDIDLGLLFNTNGFMLEENVVSTKPRFHFIADKQNDISSIVVELDYPVDISEVSRVMENLLLESADKLLRYKGMLWIDGEPNRLLFQGVQRLYSADWDRPWGDEKPHSTMVFIGIQLPEEEIRAAFAGLRK

SEQ ID NO: 7739 - DNA, 963 bp, Deinococcus radiodurans R1
  CDS (1)..(963): transl_table=11
gtgtttcggagcctgggcaggcggctctaccctgtctccatgcagattcctgtcatcgtcgtggggggctttctgggggcgggcaagaccacgctggtcaaccacctcattcgctcgctgccccgtcgcctcggcatcatcgtcaatgagtttgggcagacgggggtggacggctcattgattgagcggctggacgacgatgtgaccgagctggcggcgggctgcctgtgctgcaccgggcgcgacgacctgctgcgcgcgctgatggagatttccatgcgcgagcacaagcccgacgccctgattgtggaactcagcggggtggcggacccgaccccggtgctgaccacgctgctcgagcgctccgtgcgcgcggcctttcgcctgaccacgttggtggcggtggtggacgcccggcacgtgatgcagaccttgcaagaccaccccgaggcggcgcggcaactcgcctacgccaacctcgtcgtcatcaacaagaccgacgccgccgaccccgcccggctggaccacgccgagggggtgctgcgcggcctgaatccgctggccgaggtggtgcgggtagagcagggccagatagacgccgaaaagctgctcgcccgccgtgacttcgaccccagcgtgctgacgggtgcgggggctgtggagcacacgccggggctgagcagctttaccctccgcaccgaccggcctctggacccctacgcctggcagcggttcatgacctccttcatcctggcgcggcccgccgaggtcttgcgggtcaaaggctttctgacgctgcacggctacccgcagcgcgtgctgtttcaggcggtgcgcgacctctttaccgccgacgcctgggacgacgacctgggcggcagcgagctcgtctttatcggacgggggctggaccgcgccgagttcgagatggcctttgccgcctgcgccctgcccgagggctga

SEQ ID NO: 7740 - protein, 320 aa, Deinococcus radiodurans R1
MFRSLGRRLYPVSMQIPVIVVGGFLGAGKTTLVNHLIRSLPRRLGIIVNEFGQTGVDGSLIERLDDDVTELAAGCLCCTGRDDLLRALMEISMREHKPDALIVELSGVADPTPVLTTLLERSVRAAFRLTTLVAVVDARHVMQTLQDHPEAARQLAYANLVVINKTDAADPARLDHAEGVLRGLNPLAEVVRVEQGQIDAEKLLARRDFDPSVLTGAGAVEHTPGLSSFTLRTDRPLDPYAWQRFMTSFILARPAEVLRVKGFLTLHGYPQRVLFQAVRDLFTADAWDDDLGGSELVFIGRGLDRAEFEMAFAACALPEG

SEQ ID NO: 7741 - DNA, 1329 bp, Xylella fastidiosa 9a5c
  CDS (1)..(1329): transl_table=11
atgtcaacgctgacgctaccctccgatctccgcttacctgtgaccgttttctcgggtttccttggtgccggtaagacaaccctgctgaatcgcctcttgaataaccgtgatggtctgcgtgtggcagtgatcgttaacgacatgagcgaagtcaacattgatgcacagttggtacgtgatggcggtgctgctctcagccgtaccgatgaaacattggttgaattcagcaacggatgtatctgctgcacgctacgcgatgatttatccaaggaggtcaaacgtcttgcgttggagcaacgctacgattacctgttgatcgaatccacaggcattggcgagccaatgcctgtcgcggcaacatttgcggtgcgggatgccgacggcttttgtctttcagatgtagcgcgtttggataccatggtcacggtcgttgatggtagccaatttactgcgctattcagctcaatgaatacattagctgacttaggtcagcaagcagattccgacgatactcgcagccttgccgacctgcttggccaacagatcgagtttgctgacaccattgtcatcagcaaatgtgatctgattgatacgacgcaacttgcgcgcgtgcgtgcagtggtgcgcgggcttaaccgtgacgcgcagatcattgaagcacaccttggagaagtacccctaccccaactcgttggtactgggcgtttcgatttcactcgcgcgcaacttgcgccgggttggatgcgcgagctacgtggcgaacatactcctgaaaccgaagagtacgggatcaccagctttgtttaccgtgcgcgccgtccattccacccattacgcttcaaccatttgcttgctcatgggctgtctggtgtgattcgcagcaagggcttcttctggttagcaagtcgtatggattgggttggcgaattatccagcgttggtagtgccacccgcactcaagcagccgggttttggtatgccgcacggcaccgtgtcgacgtacatgaggaaaatatgccgccgcagattggcatcgccccactgccctacaccgaactaggttggcaacgtcaacagaatgattgttggaccgcaccattgcctgcgccgcatgaggtgagcgatcctggcgaatatgtggcgatgcagcgcctatggcatccacaatggggcgatcgccgacaagaattggcggtcattgggttggatatggataaagatgttgcacgtaatgaattagatgcttgcctgctcagcaacgaagagctgaggatggggccaatgtattggagcgcactaccagacccattcccacagtggcgccgctga

SEQ ID NO: 7742 - protein, 442 aa, Xylella fastidiosa 9a5c
MSTLTLPSDLRLPVTVFSGFLGAGKTTLLNRLLNNRDGLRVAVIVNDMSEVNIDAQLVRDGGAALSRTDETLVEFSNGCICCTLRDDLSKEVKRLALEQRYDYLLIESTGIGEPMPVAATFAVRDADGFCLSDVARLDTMVTVVDGSQFTALFSSMNTLADLGQQADSDDTRSLADLLGQQIEFADTIVISKCDLIDTTQLARVRAVVRGLNRDAQIIEAHLGEVPLPQLVGTGRFDFTRAQLAPGWMRELRGEHTPETEEYGITSFVYRARRPFHPLRFNHLLAHGLSGVIRSKGFFWLASRMDWVGELSSVGSATRTQAAGFWYAARHRVDVHEENMPPQIGIAPLPYTELGWQRQQNDCWTAPLPAPHEVSDPGEYVAMQRLWHPQWGDRRQELAVIGLDMDKDVARNELDACLLSNEELRMGPMYWSALPDPFPQWRR

SEQ ID NO: 7743 - DNA, 987 bp, Escherichia coli O157:H7
  CDS (1)..(987): transl_table=11
gtgaccaggaccaacctcatcaccggttttctcggcagcgggaaaaccacgtcgattcttcatctgttagcccataaagatcccaacgaaaaatgggcggtactggttaatgaatttggggaagtcggaattgatggtgctttgctcgccgatagcggcgcactgctgaaagagatccccggcggctgcatgtgctgcgttaatggtttacccatgcaggtagggttgaataccttactgcgtcagggaaaaccagaccgcttgttgatagagccgactgggctgggccatccgaaacagatcctcgatctgttaaccgcaccagtctatgaaccgtggatagatctgcgcgccacgttgtgcattctcgatccacgcctgctgctggacgaaaaaagcgccagcaatgaaaacttccgtgaccagctggctgccgcagacatcattgtcgccaataaatccgaccgtgcgacacctgaaagcgagcaagcgctacagcgctggtggcagcaaaatggtggcgatcggcaattaattcacagtgagcatgggaaagttgccggtcatcttctggatttgccgcgtcacaatttagccgagttgcccgccagcgccgcgcattctcatcagcatgtcgtgaaaaaagggttagcagcgttaagcctgccagagcatcaacgctggcgtcgcagtctgaacagtggacaaggacatcaggcctgcggctggatattcgacgctgatacggtattcgacaccattggcattctggaatgggcgcgacttgcaccggtggaacgcgtcaaaggcgtgctgcgtattcccgaagggctggtgcgaatcaaccgtcagggcgatgacctgcacattgaaacgcaaaacgttgcgccaccggacagccgtattgagctgatttccagcagcgaagctgactggaatgccttgcagagcgcgctgttgaagcttcgtttagcgactaccgcgtaa

SEQ ID NO: 7744 - protein, 328 aa, Escherichia coli O157:H7
MTRTNLITGFLGSGKTTSILHLLAHKDPNEKWAVLVNEFGEVGIDGALLADSGALLKEIPGGCMCCVNGLPMQVGLNTLLRQGKPDRLLIEPTGLGHPKQILDLLTAPVYEPWIDLRATLCILDPRLLLDEKSASNENFRDQLAAADIIVANKSDRATPESEQALQRWWQQNGGDRQLIHSEHGKVAGHLLDLPRHNLAELPASAAHSHQHVVKKGLAALSLPEHQRWRRSLNSGQGHQACGWIFDADTVFDTIGILEWARLAPVERVKGVLRIPEGLVRINRQGDDLHIETQNVAPPDSRIELISSSEADWNALQSALLKLRLATTA

SEQ ID NO: 7745 - DNA, 957 bp, Escherichia coli O157:H7
  CDS (1)..(957): transl_table=11
atgaacccgattgcagttaccctactcaccggttttttaggcgcgggcaaaaccaccctgctgcgccatattcttaacgaacaacacggctacaagattgccgtgattgaaaacgaatttggcgaagtctccgttgatgatcaactgattggcgaccgcgccacgcagatcaaaacgctgaccaacggctgcatctgctgttcgcgctccaacgagctggaagacgcactactcgacctgctggataatctcgataagggcaatattcagttcgatcgtctggtcattgaatgcaccggcatggccgatcccggcccgattattcagacctttttctcccatgagattttatgccagcgttacctgctggacggcgtgattgcgctggtggatgcggtacatgccgatgagcagatgaaccagttcaccatcgcccagtcccaggttggctacgccgaccgtattctgctgaccaaaaccgacgtcgcaggcgaagcagaaaaactgcgcgaacgcctggcgcgcatcaacgcccgtgcaccggtctacaccgttacccacggcgacatcgacctgggcctgctgttcaacaccaacggttttatgctggaagaaaacgtcgtcagcaccaaaccgcgtttccactttatcgcggataaacaaaacgatatttcgtcgattgtggtagaactggattacccggtagatatcagcgaagtttcccgcgtgatggaaaacctgctgctggaatcggcggataaactgctgcgttacaaagggatgctgtggattgacggcgaacctaaccgcctgctgttccagggcgtccagcgcctctacagcgccgactgggaccgcccgtggggcgatgaaaaaccgcatagcacaatggtttttatcgggattcagttgccggaggaagagattcgggcagcgtttgcggggttgaggaagtaa

SEQ ID NO: 7746 - protein, 318 aa, Escherichia coli O157:H7
MNPIAVTLLTGFLGAGKTTLLRHILNEQHGYKIAVIENEFGEVSVDDQLIGDRATQIKTLTNGCICCSRSNELEDALLDLLDNLDKGNIQFDRLVIECTGMADPGPIIQTFFSHEILCQRYLLDGVIALVDAVHADEQMNQFTIAQSQVGYADRILLTKTDVAGEAEKLRERLARINARAPVYTVTHGDIDLGLLFNTNGFMLEENVVSTKPRFHFIADKQNDISSIVVELDYPVDISEVSRVMENLLLESADKLLRYKGMLWIDGEPNRLLFQGVQRLYSADWDRPWGDEKPHSTMVFIGIQLPEEEIRAAFAGLRK

SEQ ID NO: 7747 - DNA, 1296 bp, Agrobacterium tumefaciens str. C58
  CDS (1)..(1296): transl_table=11
ttggaaccggcacttcaaaaatcctccgtttccagatcgcctgccgtggtcgtcatgacgtccacgcgactgttgccacagaacgaggtccccatgaaaaaactccctgtcaccgtcctctccggctttttaggcgctggcaaaaccacccttctcaaccacatcctcgccaatcgcgatggcctgcgcgtggcgttgatcgtcaacgatatgagcgagatcaacatcgatgcggcgctggtgcgcgatggcggcgccaatctttcccgcaccgaggaacagctggtggaaatgaccaatggctgcatctgttgcacgttgcgcgatgaccttctgaccgaggtgcgtgcgctcgccgaacagggccgattcgattatctcctgatcgaatccaccggcatcgccgagccacttcccgtggccgccaccttcgatttccgcgatgagaacggccgcagcctgtcggatgttgcgcagctggatacgatggtgacggtggtggatgccgccaatcttctcaatgattacggttcgtccgattttctggccgaccggggcgaaacggcgggtgatggcgacaaccgcaccattgtcgacctcctggtagagcagatcgaatttgccgatgtggtcgtcctcaacaagatcggcaccgccacgccggaggaacgggatgcggcccgcaagatcattgtcgggctgaacccggatgcaaaactcatcgaggcggatttcggcaaggtggaactgaaggaggttctggggaccggccgcttcgatttcgccagggccgaagaacatcccctctggttcaaggagctgcatggcttcaaggaccacattccagagaccgaggaatatggcatccgctccttcgtttaccgcgccaaaaagcccttcgaccccgtactcttccagcgcttcatcgatcgtgcctggccgggcgtggtgcgcgccaagggtttcttctggctggcgacacggccgcgttatgtcggtgagatcagccaggcgggcgcattggttcgcaccggcaagatgggtttgtggtggtccgccgtgcccagggaacaatggccgcgcgaaaagcagttcctcgacatgatggaaccctatctcgacccgaccttcggtgaccggcggcaggaaatcgtgttcatcggttccgatccgatgagcgaggcccgcatccgggcgcagctggatgcctgcctgatcgatactgaggccttcacgccggacgcctggcggcacctgcccgacccctttgcgaactgggatagacaggcggcctga

SEQ ID NO: 7748 - protein, 431 aa, Agrobacterium tumefaciens str. C58
MEPALQKSSVSRSPAVVVMTSTRLLPQNEVPMKKLPVTVLSGFLGAGKTTLLNHILANRDGLRVALIVNDMSEINIDAALVRDGGANLSRTEEQLVEMTNGCICCTLRDDLLTEVRALAEQGRFDYLLIESTGIAEPLPVAATFDFRDENGRSLSDVAQLDTMVTVVDAANLLNDYGSSDFLADRGETAGDGDNRTIVDLLVEQIEFADVVVLNKIGTATPEERDAARKIIVGLNPDAKLIEADFGKVELKEVLGTGRFDFARAEEHPLWFKELHGFKDHIPETEEYGIRSFVYRAKKPFDPVLFQRFIDRAWPGVVRAKGFFWLATRPRYVGEISQAGALVRTGKMGLWWSAVPREQWPREKQFLDMMEPYLDPTFGDRRQEIVFIGSDPMSEARIRAQLDACLIDTEAFTPDAWRHLPDPFANWDRQAA

SEQ ID NO: 7749 - DNA, 1203 bp, Staphylococcus aureus subsp. aureus Mu50
  CDS (1)..(1203): transl_table=11
atggctaaaattccagttacggtattaagtggttatttaggctcggggaaaacaacattgttaaatcatattttacaaaatcgtgaaggtcgacgtatcgcggtaattgtaaatgatatgagtgaagttaatatcgataaagatcttgtcgcagatggtgggggactatcgcgtacagatgaaaaattagtcgaactctctaatggttgtatctgttgtacacttagagatgatttattaaaagaagttgagcgtttagtgaaaaaaggtggcatcgatcaaattgttattgagtcaacagggatttcagagccagtacctgttgcacaaactttctcatatattgatgatgaacttggcattgatcttacagcgatttgccgtttagatacaatggttacagttgttgatgctaaccgcttcgtacatgacatcaactcagaagatttattgatggatcgtgatcaaagcgttgatgaaacagatgaacgttcgattgctgatttattaattgaccaagttgaattttgtgatgtattgattattaataaaattgatttaattagtgaagaagaacttgcaaagttagaaaaagtgttaagcgcattgcaacctattgctaaaattattaagacaacaaattctgaagtagatttaaaagaagtcttaaatacgcagcgttttgattttgaaaaagcgagcgagtcagcaggatggatcaaagaacttgagtcgggtggtcatgcatcgcatacgcctgaaacagaagaatatggcatatcatcatttgtatataaacgtcgtctacctttccatgctaaaaggttcaatgattggttagaaagcatgtcaaataatgtcgttcgatcaaaaggtatcgtatggttagcacaatacaatcatgtagcatgtttattatctcaagcagggtcatcttgcaatattcacccagttacatattgggtggctagtatgtctgaagcgcaacaaacacaaatattagcagaacgtcaagatgtcgcagctgaatgggatccagaatatggcgatcgtcatacacaatttgtcattattggtacagaattagatgaagaaaaattaacaaaagaactcgatgcatgcttagtcaatgcgcaagaaattgatgcagattggcaacaatttgaagatccatatcaatggcaaattagaccagcacgataa

SEQ ID NO: 7750 - protein, 400 aa, Staphylococcus aureus subsp. aureus Mu50
MAKIPVTVLSGYLGSGKTTLLNHILQNREGRRIAVIVNDMSEVNIDKDLVADGGGLSRTDEKLVELSNGCICCTLRDDLLKEVERLVKKGGIDQIVIESTGISEPVPVAQTFSYIDDELGIDLTAICRLDTMVTVVDANRFVHDINSEDLLMDRDQSVDETDERSIADLLIDQVEFCDVLIINKIDLISEEELAKLEKVLSALQPIAKIIKTTNSEVDLKEVLNTQRFDFEKASESAGWIKELESGGHASHTPETEEYGISSFVYKRRLPFHAKRFNDWLESMSNNVVRSKGIVWLAQYNHVACLLSQAGSSCNIHPVTYWVASMSEAQQTQILAERQDVAAEWDPEYGDRHTQFVIIGTELDEEKLTKELDACLVNAQEIDADWQQFEDPYQWQIRPAR

SEQ ID NO: 7751 - DNA, 927 bp, Staphylococcus aureus subsp. aureus Mu50
  CDS (1)..(927): transl_table=11
atgaaaaataataaagatgaaaaaataagaatatccataattaacggatttttgggtagtggtaaaaccacgttactgacacattatattagtgaattattaaaaaatgatgagaaaattaaaatcatcatgaatgaattcggtacttttgatattgatagcaatagtatttcaaatgaaattgaagtccattcattgattaatggttgtgtttgttgcgatcttaaacaagaacttgtctatgaactaaaagccattgctttaaaaggggacgttaatcatgtcatcatagaagcgacaggcattgcgcatcctttggaattactagttgcatgtcaagatccgcaaatcgttaatttctttgaaaagccgattatttatggtgtattagatgcgactcgatttttagaacgtcatcaatataccgaaaatacagtttcgctgatggaagaacagttgaaactaagtgacatgattattattaataaaattgatcttataactgatgacagtcttgagaaaattgataagcaattaggtatgatttgtgcaagtattccaacttataaaacaacctatggaaaagtttcgttggaagaattggacttaactgttaaagacagagagatatcgtctcatcatcaccatcatcatgggattaaaagtatgacttacacgtttacaggtccgattgatcgtcaattgttttatcaatttataatgaaattaccggaatctgttctacgtttgaaaggttatgtgtcatttagaaatcaaccaaatgcaatttatgaatttcaatatgcatatggtttaccagactatggaataattggcatgcaattaccattaacgattgttattattggtgaaactttagatacaaatcacatacgtaatcaattggatatgctacaatttacgtaa

SEQ ID NO: 7752 - protein, 308 aa, Staphylococcus aureus subsp. aureus Mu50
MKNNKDEKIRISIINGFLGSGKTTLLTHYISELLKNDEKIKIIMNEFGTFDIDSNSISNEIEVHSLINGCVCCDLKQELVYELKAIALKGDVNHVIIEATGIAHPLELLVACQDPQIVNFFEKPIIYGVLDATRFLERHQYTENTVSLMEEQLKLSDMIIINKIDLITDDSLEKIDKQLGMICASIPTYKTTYGKVSLEELDLTVKDREISSHHHHHHGIKSMTYTFTGPIDRQLFYQFIMKLPESVLRLKGYVSFRNQPNAIYEFQYAYGLPDYGIIGMQLPLTIVIIGETLDTNHIRNQLDMLQFT

SEQ ID NO: 7753 - DNA, 1065 bp, Sinorhizobium meliloti 1021
  CDS (1)..(1065): transl_table=11
atgacactcgcaagggctccgcagcgcaagataccggctaccgtcatcaccggctttctcggtgccggcaagacgacgatgatccgcaacctgctgcagaatgccgacggcaagcgcatagcgctgatcatcaacgaattcggcgatctcggggtcgacggcgatgtgctgaagggctgcggagcggaagcctgttcggaagaggatatcatcgaactgaccaatggctgcatctgctgcaccgttgccgacgacttcatcccgaccatgacgaagctgctcgagagggagaaccggccggatcatatcgtcatcgaaacctccggcctggcgctgccgcagccgctcgtcgccgcattcaactggccggacatccgcagcgaggtaacggtcgacggcgtcgtcacagtggtcgatagcgcagcggtcgccgcgggccgctttgcggatgatcacgacaaggtggacgcgctgcgcgtcggcgacgataatctcgaccacgagagcccgctcgaagaacttttcgaggatcagctcaccgccgcagacctcatcgttctcaacaagacggaccttatcgacgccgcgggactcaagtccgtgcgcgaagaggtggcctcccgcatcagccgcaagccgacgatgatcgaggcgaggaacggcgaggtagccgccgccatcctgctcgggcttggcgtgggtacggagggcgatatcgtcaaccgcaagtctcaccacgagatggaacatgaggcaggcgaggagcatgatcacgacgagttcgacagcttcgtcgtagagctcggcgcgatagccgaccctgccgctttcaccgaaaggctcaagggcgtgatttcagagcacgacgtgctgcgcctcaagggcttcgtcgacgttccgggaaagccgatgcgcctcctggtccaggcggtcggcagccgcatcgaccagtatttcgaccgcgcatgggcttccggccaaacacgcagcacgcgtctcgtcgtcatcgggctgcacgacatggacgagcctgccgtgcgtgcagcgatttcggcactcgtgtga

SEQ ID NO: 7754 - protein, 354 aa, Sinorhizobium meliloti 1021
MTLARAPQRKIPATVITGFLGAGKTTMIRNLLQNADGKRIALIINEFGDLGVDGDVLKGCGAEACSEEDIIELTNGCICCTVADDFIPTMTKLLERENRPDHIVIETSGLALPQPLVAAFNWPDIRSEVTVDGVVTVVDSAAVAAGRFADDHDKVDALRVGDDNLDHESPLEELFEDQLTAADLIVLNKTDLIDAAGLKSVREEVASRISRKPTMIEARNGEVAAAILLGLGVGTEGDIVNRKSHHEMEHEAGEEHDHDEFDSFVVELGAIADPAAFTERLKGVISEHDVLRLKGFVDVPGKPMRLLVQAVGSRIDQYFDRAWASGQTRSTRLVVIGLHDMDEPAVRAAISALV

SEQ ID NO: 7755 - DNA, 1146 bp, Sinorhizobium meliloti 1021
  CDS (1)..(1146): transl_table=11
atgaacggtccaatgcgggtggtgccggtctcgatcctcaccggctttctcggcgcgggcaagacgacccttctgaaccgggtgctcaaggatccggcgcttgccgacacggcagtcatcatcaacgaattcggcgatgtctccatcgaccacctcctggtcgaggcgtcgagtgacggcgtcatcgagctttccgacggctgcctgtgctgcaccgtgcgcggcgaactcgtcgatacgctggccgatctcatggaccggatgcagaccggccgcatcaagccgctgaagcgcgtcgtcatcgaaaccaccggtcttgccgatccggcaccggtgctgcaatccgtcctcggcaatcccgtgattgcccagaatttccggctggacggagtcgtcaccgtcgtcgatgcggtcaatggcgagcagacgatcgccaatcatgtggaagccatgaagcaggtcgcggtggccgaccggctggtgatcagcaagagcgggctcgccaaagatgatggtgtcggcaggctcgaggcgcggctcagggatctcaacccgcgcgcgccgatcatcgacggcgacacggaagaggcgggccgggccgatctcttcgcctgcggtctttacgacgccacgaccaaggtcgccgatgtcggccgctggctccaggacgaggcccatgcggacggccacggccacgttcatgaccaccaccacgaagatggtcacggccatgggcaccatcaccatcatcacgacgtcaatcgtcatggttcggacattcgctcattcagcatcgtgcatgatcggccgatcgaaccgatggcgctggagatgttcatcgacctcctgcgctcggcccatggggaaaagctcctgcgcatgaaggctatcgtttccgtcgccgacaatccggagcggccggtggtgctgcacggcgtgcagacggtctttcacgcgccggagcggcttgccgcctggccggatccggccgatcgccggacgcgaatggtgctgatcaccaaaggcctggacgaagcattcgtgcgcgacctcttcgacgcattcaccggcaagccgcgcgtcgatcgaccggacgcgcaggcgctcgcggacaaccccctggcggtgccggggatgaagttctga

SEQ ID NO: 7756 - protein, 381 aa, Sinorhizobium meliloti 1021
MNGPMRVVPVSILTGFLGAGKTTLLNRVLKDPALADTAVIINEFGDVSIDHLLVEASSDGVIELSDGCLCCTVRGELVDTLADLMDRMQTGRIKPLKRVVIETTGLADPAPVLQSVLGNPVIAQNFRLDGVVTVVDAVNGEQTIANHVEAMKQVAVADRLVISKSGLAKDDGVGRLEARLRDLNPRAPIIDGDTEEAGRADLFACGLYDATTKVADVGRWLQDEAHADGHGHVHDHHHEDGHGHGHHHHHHDVNRHGSDIRSFSIVHDRPIEPMALEMFIDLLRSAHGEKLLRMKAIVSVADNPERPVVLHGVQTVFHAPERLAAWPDPADRRTRMVLITKGLDEAFVRDLFDAFTGKPRVDRPDAQALADNPLAVPGMKF

SEQ ID NO: 7757 - DNA, 1107 bp, Sinorhizobium meliloti 1021
  CDS (1)..(1107): transl_table=11
atgaccgaaacatccgcgcagaagccgatccccgtcaccgtgctcacgggctatctcggctccggcaagacgacgcttctgaaccgcatcctcagcgagaatcatggccgcaaatatgcggtcatcgtcaacgagttcggcgagatcggcatcgataacgacctgatcgtcgagtccgacgaggaaatctacgagatgaacaacggctgcgtctgctgcaccgttcgaggcgacctgatccgtgtcgtcgaaggactgatgcgccgtcccggacgcttcgacgcgatcatcgtcgagaccaccggccttgccgacccggtgccggtcgcgcagaccttcttcatggatgacgacgttcgcgccaagaccgaactggacgccgtcgtggcgctcgtcgacgccaagcacctgccgctgcgtctgaaggacagccgcgaggccgaggaccagatcgccttcgccgacgtggtgctcctcaacaagaccgacctcgtgacgccggaggaactcgagcgcgtcgaggcgaccgtgcgcgtcatcaatccgtccgcccgtatctatcgcacgcagcgctccgagatcgacctcggaaaggtgctcgaccggggggccttcaatctcgacagggcgctcgaaaacgatccccacttcctcgatcaggaggatcacgaccacgtttgcggtcccgattgcgaccacgatcaccaccatcatgatcaccaccatcatgatcatgatcatgatcacgaccacgaccacgaccaccatcaccatcaccatcacgacggtccctcgccgatccatgacgtgacggtgcagtcgatttcgctgcgcgggggcgaaatgaatccggatcgtttcttcccctggatccagaagatcacccagaccgacggtccgaacatcctgcgcctcaagggcatcatcgcctttgccggcgatgcggagcgttatgtcgtccagggcgttcacatgatcatcgaaggcgatcaccagcgcccgtggaaagacggcgagaagcgcgaaagcaggctcgtcttcatcggccgcgatctcgaccgcgagaagatcgagcgcaccttcaaggcgtgcgaagtccaggcatga

SEQ ID NO: 7758 - protein, 368 aa, Sinorhizobium meliloti 1021
MTETSAQKPIPVTVLTGYLGSGKTTLLNRILSENHGRKYAVIVNEFGEIGIDNDLIVESDEEIYEMNNGCVCCTVRGDLIRVVEGLMRRPGRFDAIIVETTGLADPVPVAQTFFMDDDVRAKTELDAVVALVDAKHLPLRLKDSREAEDQIAFADVVLLNKTDLVTPEELERVEATVRVINPSARIYRTQRSEIDLGKVLDRGAFNLDRALENDPHFLDQEDHDHVCGPDCDHDHHHHDHHHHDHDHDHDHDHDHHHHHHHDGPSPIHDVTVQSISLRGGEMNPDRFFPWIQKITQTDGPNILRLKGIIAFAGDAERYVVQGVHMIIEGDHQRPWKDGEKRESRLVFIGRDLDREKIERTFKACEVQA

SEQ ID NO: 7759 - DNA, 990 bp, Sinorhizobium meliloti 1021
  CDS (1)..(990): transl_table=11
atgcccgatcagcttgcccccacccccgtcaccgtccttaccggctatctcggagcaggaaagaccacacttctcaaccgcatcctctccgagccgcatggcaagaaattcgcggtcatcgtcaacgagttcggcgaggtcggcatcgataacgatctcatcgtcgatgccgacgaggaggtgttcgaaatgaacaatggctgcatctgctgcacggtgcgcggggacctgatccgcatcatcgaagcgctgatgcggaggcgcgagcggttcgacggcatcctgatagagacgacgggcctcgccgaccccgcgccggtcgcccagactttcttcgtcgacgaggatgtccgctccaagacacggctcgactccatcattaccgttgtcgatgccaagcaccttctcggcgagatcgaccgcgcacatgaagcgcaggagcaattggccttcgccgacacgatcatcctcaacaagaccgatctcgtatcgcccgaaggcctgcaggccgtggaagatcgcatccgccgcatcaatccgacggccggcattctcaagacgcagcgctgcaatctcgagatcgccagcctgctcgatcgcaatgccttcgatctcgaccgcattctcgaggtcgagcccgactttctcgaagcggaccacgatcacgagcatgacgaccatgtcgccagtttttcactggtcgaacgccgacccgtagacccggaaaaattcttccgctggctccagacgaccgcccgggccttcggcacggacatgctgcggatgaagggcatcatcgcctttgccggcgacaccgaccgctatgtcgtccagggcgtccacatgctggtggaaggcgaccaccagcgcccctggaaggagggcgaagagcgcgtctcgcgcctcgtcttcatcggccgcaaccttcccaaggacgtcatcaccgacggcttcatggcatgctgcgcgaacccggccgtcgtgggatag

SEQ ID NO: 7760 - protein, 329 aa, Sinorhizobium meliloti 1021
MPDQLAPTPVTVLTGYLGAGKTTLLNRILSEPHGKKFAVIVNEFGEVGIDNDLIVDADEEVFEMNNGCICCTVRGDLIRIIEALMRRRERFDGILIETTGLADPAPVAQTFFVDEDVRSKTRLDSIITVVDAKHLLGEIDRAHEAQEQLAFADTIILNKTDLVSPEGLQAVEDRIRRINPTAGILKTQRCNLEIASLLDRNAFDLDRILEVEPDFLEADHDHEHDDHVASFSLVERRPVDPEKFFRWLQTTARAFGTDMLRMKGIIAFAGDTDRYVVQGVHMLVEGDHQRPWKEGEERVSRLVFIGRNLPKDVITDGFMACCANPAVVG

SEQ ID NO: 7761 - DNA, 855 bp, Escherichia coli K12
  CDS (1)..(855): transl_table=11
gtgattgaaaacgaattcggcgaagtctctgttgatgatcaactgattggcgaccgcgccacgcagatcaaaacgctgaccaacggctgcatctgttgttcgcgctccaacgagctggaggacgcgctactcgacctgctggacaatctcgacaagggcaatattcagttcgaccgtctggtcattgaatgcaccggcatggccgatcccggcccgattattcagacctttttctcccatgaagttttatgccagcgttatctgctggacggcgtgattgcgctggtggatgcggtacatgccgatgagcagatgaaccagttcaccatcgcccagtcacaggttggctacgccgaccgcattctgctgaccaaaaccgacgtcgcaggcgaagcagaaaaactgcatgaacgcctggcgcgcatcaacgcccgcgcaccggtctacaccgtcacccacggcgacatcgatctgggcctgctgttcaacaccaacggttttatgctggaagaaaacgtcgtcagcaccaaaccgcgtttccactttatcgcagataaacaaaacgatatttcgtcgattgtggtggaactggattacccggtagatatcagcgaagtttcccgcgtgatggaaaacctgctgctggagtcggcggataaactgctacgttacaaagggatgctgtggattgacggcgaacctaaccgcctgctgttccagggcgtccagcgcctctacagcgccgactgggacaggccgtggggcgatgaaaaaccgcatagcacgatggtgtttatcgggatccagctgccggaggaagagattcgggctgcgtttgcggggttgaggaagtaa

SEQ ID NO: 7762 - protein, 284 aa, Escherichia coli K12
MIENEFGEVSVDDQLIGDRATQIKTLTNGCICCSRSNELEDALLDLLDNLDKGNIQFDRLVIECTGMADPGPIIQTFFSHEVLCQRYLLDGVIALVDAVHADEQMNQFTIAQSQVGYADRILLTKTDVAGEAEKLHERLARINARAPVYTVTHGDIDLGLLFNTNGFMLEENVVSTKPRFHFIADKQNDISSIVVELDYPVDISEVSRVMENLLLESADKLLRYKGMLWIDGEPNRLLFQGVQRLYSADWDRPWGDEKPHSTMVFIGIQLPEEEIRAAFAGLRK

SEQ ID NO: 7763 - DNA, 1098 bp, Caulobacter crescentus CB15
  CDS (1)..(1098): transl_table=11
atgacccagactgtcccgacctccggcaagatccccgtcaccgtgctcaccggctatctcggcgccggcaagaccactttgctcaaccgcatcctcaccgaggagcacggcaagcgctacgccgtgatcgtcaacgagttcggcgaggtcggcatcgacaacgacttggtggtcggcgccgatgaagaagtgttcgagatgaacaacggctgcgtctgctgcaccgtgcgcggcgacctgatccgggttctccagggcctgatgaagcgaaagggcggtttcgacgccatcatcgtcgagacgacgggcctggccgatccgggtcccgtggctcagaccttcttcgtcgacgatgacgtcaaggcgcgtaccgccctcgactcggtcacggccgtggtcgacgccaagcacatcctgctgcgcctatctgacagcaaggaggccgtcgagcagatcgccttcgccgaccagatcgtgttgaacaagaccgacctggtgtcagaggacgacctgcgacacgtcgaggcgcgcatccgtcggatcaacccgctggccccgatccaccgcgcccagcgttcgaacgttccgctggacgccattctaggcaagcacagcttcgatctcgagcggatcaccgacctggagccggacttcctcaatccggcccatggcgagccggggcacgtgcacgacgagcactgcgaccaccatcaccatcacgaccatgaccacgtgcatgacgagcactgcggtcacgaccaccaccatcatcatcacgaccacaagagcgacgtccacgatgacggcgtgaagggcatctcgctgacgctggataagccggtggacggccagaagatcaccgcctggctcaatgacctgctggcccgtcgcggccccgacatcctgcgcgccaagggcatcatcgacgtgaagggcgaggacaagcgcctcgtgttccaagcggtgcacatgatcctggagggtgacttccagcgcccgtggaccgacaaggacaagcgctacagccggatggtcttcatcggtcgcgacctcgacgaggccgagctgcgcgcgggcttcgaggcgacggcggcttaa

SEQ ID NO: 7764 - protein, 365 aa, Caulobacter crescentus CB15
MTQTVPTSGKIPVTVLTGYLGAGKTTLLNRILTEEHGKRYAVIVNEFGEVGIDNDLVVGADEEVFEMNNGCVCCTVRGDLIRVLQGLMKRKGGFDAIIVETTGLADPGPVAQTFFVDDDVKARTALDSVTAVVDAKHILLRLSDSKEAVEQIAFADQIVLNKTDLVSEDDLRHVEARIRRINPLAPIHRAQRSNVPLDAILGKHSFDLERITDLEPDFLNPAHGEPGHVHDEHCDHHHHHDHDHVHDEHCGHDHHHHHHDHKSDVHDDGVKGISLTLDKPVDGQKITAWLNDLLARRGPDILRAKGIIDVKGEDKRLVFQAVHMILEGDFQRPWTDKDKRYSRMVFIGRDLDEAELRAGFEATAA

SEQ ID NO: 7765 - DNA, 1050 bp, Sinorhizobium meliloti 1021
  CDS (1)..(1050): transl_table=11
atgcagaccaaccatcttcaggacagcaaaattcccgtgaccatcctgaccggcttcctcggcgccggaaagacaacgcttctcaaccacatattgacggaacggcacggtcaccgcatcgcggtgatcgagaacgagttcggcgaggtggatgtggactcggatctcgtgctcgcctccgaggaagagatctaccagatgaagaacggctgcatctgctgcttcgtcgatgtgcgcaacgacctgatcgaggttctgcagaagctgcttgcccgcaaggacaagttcgaccacatccttgtcgagaccagcgggcttgccgatccgacccccgtcgcgacggctttcttcatcgacgacgaaatcggcaagcacgtaacgctggacggcatcgtgacgctggtcgatgccaagcatatcggccagcatatcgacgatcccgtgctcgatgggcgcgacaaccaggccgtcgaccagatcgtcgccgccgaccgcatcatcatcaacaagatcgacctcgtatcggaaggagagatcgctccgctcgagcgcggcatgcgcaagctcaaccagacggccgaaatcgtacgttcgagctacggcagggtggatctgtcgagcattctcggcatttccggcttcgcgccgtcctacgtggccgagcgcgccaagctgctcgacctcgatcatcatcaccaccacgatcatcaccaccatcaccatcacctgcatgacgcgacggtcagttcggaatccttcgtcttcgaccggcctttcgaccagggccgcctgacggactatctggcgggcctgcttcgggaggaaggcgacgacatcttccgaaccaaaggcataatagcgattgccggcgatcctcgcttcttcgtgctccaggcggtgcacaagctgatggacttccgtccggaccacgtctgggggaaggacatgccttatacgaagctggtcttcatcggccgcaacctcgaccgggcggcgctggaaagaggactggagtgttgcctcgcctcggcgggcgatacggataattga

SEQ ID NO: 7766 - protein, 349 aa, Sinorhizobium meliloti 1021
MQTNHLQDSKIPVTILTGFLGAGKTTLLNHILTERHGHRIAVIENEFGEVDVDSDLVLASEEEIYQMKNGCICCFVDVRNDLIEVLQKLLARKDKFDHILVETSGLADPTPVATAFFIDDEIGKHVTLDGIVTLVDAKHIGQHIDDPVLDGRDNQAVDQIVAADRIIINKIDLVSEGEIAPLERGMRKLNQTAEIVRSSYGRVDLSSILGISGFAPSYVAERAKLLDLDHHHHHDHHHHHHHLHDATVSSESFVFDRPFDQGRLTDYLAGLLREEGDDIFRTKGIIAIAGDPRFFVLQAVHKLMDFRPDHVWGKDMPYTKLVFIGRNLDRAALERGLECCLASAGDTDN

SEQ ID NO: 7767 - DNA, 1059 bp, Synechocystis sp. PCC 6803
  CDS (1)..(1059): transl_table=11
atgcacaaaatccccgttaccgtagtcactggcttcctcggctctggcaaaaccaccttggttaggaacctattacaaaacaaccaagggcgacgcattgcagtgttagtcaacgagtttggggaagtgggcattgatggggatattctccgcagttgcggggtatgtgacgaggacggcaatcaaatctttccggcaagcaatgaagcccccaagattgttgaattggccaatggctgtctctgttgcactgtgcaggaggaatttttgcccaccatgcaggctttgttggagcggcgagaggaaattgactgcattgtggtggaaacttccggcttagccctgcccaaacctctcattcaagcttttcgttggccagaaattcgcactggggccacggtggatggagtaattactgtggtagatggggatgccctcgccaggggggccatggtaggggatttggaagctttggaagcccaacggcaggccgatgatagcctcgaccacgaaactcccattgaagaattgtttgaagaccagttggcctgtgcggatatggtgctgttgaccaaaaccgatttgttgggggatggggatcaacaacggctggaaaattggttaggtgaccagttacccacaggagtcaaagtggtgccctgtcaccaagggcaaattagtccagaaattctcctcggctttaatgcggcggtggaagacaacctggacagtcgccccagtcaccatgaccatgaagaagaccacgaccacgatgaggatattaatgcggtgtatgtggccctagaccaggaatttgacccggcgcatttggttcaaggtttaactgatttggtgcaagaccatgagatttatcgcattaagggttttgtcgccgtgcccaaaaaagcaatgcgcctagtactccagggagttgggcaacgatttgattatttttatgatcgcctctggacagaagaagatagcaggcaaacccgcttggtggtcattggccagggcttggaatcggaaaagatcaaaatggcgatcgccaacatttag

SEQ ID NO: 7768 - protein, 352 aa, Synechocystis sp. PCC 6803
MHKIPVTVVTGFLGSGKTTLVRNLLQNNQGRRIAVLVNEFGEVGIDGDILRSCGVCDEDGNQIFPASNEAPKIVELANGCLCCTVQEEFLPTMQALLERREEIDCIVVETSGLALPKPLIQAFRWPEIRTGATVDGVITVVDGDALARGAMVGDLEALEAQRQADDSLDHETPIEELFEDQLACADMVLLTKTDLLGDGDQQRLENWLGDQLPTGVKVVPCHQGQISPEILLGFNAAVEDNLDSRPSHHDHEEDHDHDEDINAVYVALDQEFDPAHLVQGLTDLVQDHEIYRIKGFVAVPKKAMRLVLQGVGQRFDYFYDRLWTEEDSRQTRLVVIGQGLESEKIKMAIANI

SEQ ID NO: 7769 - DNA, 1152 bp, Synechocystis sp. PCC 6803
  CDS (1)..(1152): transl_table=11
atgtccaccgttgaccatgccccccagacttcagaagcgatggccattcccaaacagggattgccggtaaccatcatcactggctttttgggcagtggtaaaaccactctgttgaactatattttgagcaatcaacaggggcttaaaaccgccgttttggtgaacgaatttggtgaaattggcattgataatgaattggtcattgccagtgacaaaaacatggtggaattgagcaatggttgtgtttgttgcaccatcaatgaagacttagttgaagcagtttataaagttttagaacgggaacagaaaattgattatttggtagtggaaactacaggtttagctgatcctttacctgtggccctgacttttttaggcacagaattgcgggatatgacccgactggattccatcattaccatggtggactgtgagaattttagtttggatttatttaatagccaggcggcccaaagtcaaatcacctacggagacatcattgtccttaataaaactgatttggtggaggaagcagacgtagattctttagaagtccgtttgcgggatttaaaaacgggagccagaattctccgcacccaaaaagcggaagttcctttacccctgattctcagtgtgggactgtttgagtcggacaaatacgctcccgaacaacacgagcaccatcaccatagccacgatcacggccatgaccatgattgtgcccccgattgccaagatccaaaccataaccatagccaccatggccatgatcatcatcatcacgaccatgaccatgatcatggcaaaaagtaccacagtgaccacctagaaatggatggcttcacctccctttctttccgcagtgagcagcccttttccattcgtaagttccagtattttctcgataatcaattaacccccaacattttccgagctaagggtattctttggttcaatgaaagcccaaaacggcatatttttcacctcagtggcaagcgttttagcctggaagatgaccaatggaaaggggaaaaatcgaatcagttggtgttaattggtcaagacctagaccatgacaaaatccgtgaacaacttaaccattgtttgagcttgccgacggagagcaaaggtaaaggttttggtaggggttaa

SEQ ID NO: 7770 - protein, 383 aa, Synechocystis sp. PCC 6803
MSTVDHAPQTSEAMAIPKQGLPVTIITGFLGSGKTTLLNYILSNQQGLKTAVLVNEFGEIGIDNELVIASDKNMVELSNGCVCCTINEDLVEAVYKVLEREQKIDYLVVETTGLADPLPVALTFLGTELRDMTRLDSIITMVDCENFSLDLFNSQAAQSQITYGDIIVLNKTDLVEEADVDSLEVRLRDLKTGARILRTQKAEVPLPLILSVGLFESDKYAPEQHEHHHHSHDHGHDHDCAPDCQDPNHNHSHHGHDHHHHDHDHDHGKKYHSDHLEMDGFTSLSFRSEQPFSIRKFQYFLDNQLTPNIFRAKGILWFNESPKRHIFHLSGKRFSLEDDQWKGEKSNQLVLIGQDLDHDKIREQLNHCLSLPTESKGKGFGRG

SEQ ID NO: 7771 - DNA, 957 bp, Salmonella typhimurium LT2
  CDS (1)..(957): transl_table=11
atgaccccgattgcagttaccctacttaccggttttcttggtgccggcaaaaccaccctactacgccatatcctcaacgaacaacatggttttaaaatcgccgttatcgaaaacgaatttggcgaagtctccgttgacgatcaactgattggcgatcgcgccacacagatcaaaaccctgactaacggctgcatctgctgtacccgctccaacgagctggaagatgcgctattagacctgctcgacagccgcgaccgcggcgatattgctttcgaccgcctggtgattgaatgcaccggcatggctgaccccggcccgattattcagacctttttctcccatgacgtattatgcgaacgctacctgttagacggcgtgattgcgctggtcgacgcggtgcacgctaacgagcagatgaatcagttcaccatagcccagtcgcagataggctacgccgaccgcattctgttgaccaaaaccgacgtggcaggcgacagcgagaaactgcgcgagcggctggcgcgtatcaacgcccgcgccccggtttacaccgtggtacacggcgatattgacctgagtcagttgtttaataccagcggctttatgctggaagagaacgtgctggcaagccaaccgcgtttccactttattgccgataaacagaacgatgtatcgtcaattgtggtggaactggattacccggtggatatcagcgaggtgtcgcgggtgatggaaaacctgctgctggaatcagcggataaactgctgcgttacaaagggatgctgtggatcgacggcgaacccaaccgcctgctgttccagggcgtgcagcgcctctacagcgccgactgggacagaccgtggggcgacgaaacgccgcacagcacgctggtatttatcgggatccagttgccggaagacgagatcagagcggcatttgtggggttaaggaagtaa

SEQ ID NO: 7772 - protein, 318 aa, Salmonella typhimurium LT2
MTPIAVTLLTGFLGAGKTTLLRHILNEQHGFKIAVIENEFGEVSVDDQLIGDRATQIKTLTNGCICCTRSNELEDALLDLLDSRDRGDIAFDRLVIECTGMADPGPIIQTFFSHDVLCERYLLDGVIALVDAVHANEQMNQFTIAQSQIGYADRILLTKTDVAGDSEKLRERLARINARAPVYTVVHGDIDLSQLFNTSGFMLEENVLASQPRFHFIADKQNDVSSIVVELDYPVDISEVSRVMENLLLESADKLLRYKGMLWIDGEPNRLLFQGVQRLYSADWDRPWGDETPHSTLVFIGIQLPEDEIRAAFVGLRK

SEQ ID NO: 7773 - DNA, 1125 bp, Nostoc sp. PCC 7120
  CDS (1)..(1125): transl_table=11
atgcaatcagcagtcaccgataattctcaaccaatggatgctcctaaacaaggaatgccagtcacgattattactggatttctcggtagtggcaagacaactttactaaatcatattctcagcaatcaacagggcttaaaaaccgccgttttggtcaacgagtttggagaaatcggcattgacaacgagttaattgtttccaccgatgagaacatggtggaactgagtaacggttgtatctgctgcactattaataatgatttagtagatgctgtatacaaggttttagaaagggaagaaaagctagattatctagttgtagaaaccactggactagctgaccccctaccagtagccctaacatttttgggtacagaattgcgggatttaacccggttagattccattattactgtagtagatgcagccaattacagtttagatttattcaactcgcaagcggcttacagccaaattgcctacggtgatgtcattctgttgaacaagacagatttggttgatgaagccagcttgaatgatttggaaagaaaaatcaatgaagttaaagaaggtgcgaggattttaagaacgaagcgatcgcaagttcccctccctttaatcttaagtgtgggtctatttgagtcggataagtattatgatgcagccgatgagcatagtcacgaccaccatgaccacgaccacgaccattcagcttgtgagcatgatcatcatgaccatgatcattcagcttgcggtcacgaccatcacgaccacgaacaccatcatcaccactccgaccatttagaaaacgatggtttcacctcaatatctttccaaagtgatcaacctttttcgattcgcaagtttcaatatttcctagataaccagctatccacaaatattttccgagccaaggggattatgtggtttgatgaaagtcccaaacgtcacattttccacctctgtggtaaacgttttactttagatgatgaagaatggaagggtgaaccaaaaaaccaaatagtgttgattggtcaaaatttagatcgtgaaaccttactcactcaattagaaaactgcgtttgtcttccttctaccagcagaggtcaaggttttgggaaatag

SEQ ID NO: 7774 - protein, 374 aa, Nostoc sp. PCC 7120
MQSAVTDNSQPMDAPKQGMPVTIITGFLGSGKTTLLNHILSNQQGLKTAVLVNEFGEIGIDNELIVSTDENMVELSNGCICCTINNDLVDAVYKVLEREEKLDYLVVETTGLADPLPVALTFLGTELRDLTRLDSIITVVDAANYSLDLFNSQAAYSQIAYGDVILLNKTDLVDEASLNDLERKINEVKEGARILRTKRSQVPLPLILSVGLFESDKYYDAADEHSHDHHDHDHDHSACEHDHHDHDHSACGHDHHDHEHHHHHSDHLENDGFTSISFQSDQPFSIRKFQYFLDNQLSTNIFRAKGIMWFDESPKRHIFHLCGKRFTLDDEEWKGEPKNQIVLIGQNLDRETLLTQLENCVCLPSTSRGQGFGK

SEQ ID NO: 7775 - DNA, 972 bp, Nostoc sp. PCC 7120
  CDS (1)..(972): transl_table=11
atgatggccgacgtaattacagattcagttcccgttactgttctgactggctatttaggcgcaggtaaaacaaccctactcaaccatatcctcacctacgagcatggcaaaaaagttgctgtcatcgttaatgaatttggggaagtaggcattgataaccaattagttattgatgcagatgaagaaatttttgagatgaacaacggctgcatctgttgtaccgttcgtggggacttaatccggatcattagcaatttgatgaagcgccgtgataagtttgaccatctagtaattgaaactactggattagctgaccctgcaccagtgattcagacattctttgtagatgaggatatgcaaagtcaactgtctttagatgcagttgtaacgctggtagatgccaagcatatttggcaacattgggatgcagacgaagcccaagaacagattgcctttgctgatgtgattttacttaataaaacggatttagttaccccatcagaattagatgaattggaaaagcggattaggtcgatgaatgcgatcgccaaaatctaccgtactcgtaattctgagttagcaatggacgctttgttgggtgtgaaagcctttgatttagatcgtgctttagagatagatcccaattttttaggtgaagatgcccacgaacatgatgatactgttttttctgtggctttagtacaagagggtgaactcgacggggaaaaattaaacgcttggatttccgaattgttgcgtacccaagggactgatatcttccgtatgaagggcatattaaatattgctggggaagataatagatttgtcttccaaggggtgcatatgatattcgatggtagacccgatcgcctctggaaacccaacgaaaaacgcaaaaacgaactagtattcatcggtcgcaatttagatgaagcccaactcaagcaagattttctcgcttgttttgcttaa

SEQ ID NO: 7776 - protein, 323 aa, Nostoc sp. PCC 7120
MMADVITDSVPVTVLTGYLGAGKTTLLNHILTYEHGKKVAVIVNEFGEVGIDNQLVIDADEEIFEMNNGCICCTVRGDLIRIISNLMKRRDKFDHLVIETTGLADPAPVIQTFFVDEDMQSQLSLDAVVTLVDAKHIWQHWDADEAQEQIAFADVILLNKTDLVTPSELDELEKRIRSMNAIAKIYRTRNSELAMDALLGVKAFDLDRALEIDPNFLGEDAHEHDDTVFSVALVQEGELDGEKLNAWISELLRTQGTDIFRMKGILNIAGEDNRFVFQGVHMIFDGRPDRLWKPNEKRKNELVFIGRNLDEAQLKQDFLACFA

SEQ ID NO: 7777 - DNA, 1041 bp, Nostoc sp. PCC 7120
  CDS (1)..(1041): transl_table=11
atggctcaaaaaattcccgtcaccgtaattacaggctttttaggtagtggtaaaaccagcctcattcgccacctactgcaaaataacgccggccgccgcatagcagttttagtcaacgagtttggcgaactaggtatagatggcgacttgttaaaatcctgtcaagtttgtcccgaagatgaggacggcgggagcaatatttttgaattaactaatggctgtctatgctgtactgtccaagaagagtttttgccgacgatgcaggaattactcaaacgaagagatagcattgattgtattgtcattgaaacctctggtttagccttacccaaaccattggtaaaagcttttcgctggcaagaaatccgcaatgctgcaaccgtggatgcagttgtcacagtggtagattgtgcggctgttgcatcaggaacatttgccagtgatttagaagcgatcgccatccaacgccaagctgatgatagtctagaacacgaaacaccattgcaagaattgtttgaagaccagctagcttgtgcagatttggtagttttaagcaaaactgatttagttgatgctgcaacaaaatcacaagtcgaggaattagtcaagcaagaactccccagagtagtgaaaatggtggagagcgatcgcggtcaactcgacccatctatactattaggattccaagctgccgtggaagacaacctagatagtcgccccagccatcacgacaccgaagaagaccacgaccacgacgacgatatcacctcaactcacctcattttagaccgggactttgacccagaaaaactgcaacaacaactgcaaacactcacaaatcaacaagaaatctaccgcattaaaggctttgtcgccgttcccaacaaacccatgcgcctagtcatgcaaggggtaggtaacagatttgataaattttatgaccgcccctggcaaccacaagaagccagacaaactcgtttagttttcatcggtcgtgatttaaactcaacagaaatagaatcacaattggtagctttgtaa

SEQ ID NO: 7778 - protein, 346 aa, Nostoc sp. PCC 7120
MAQKIPVTVITGFLGSGKTSLIRHLLQNNAGRRIAVLVNEFGELGIDGDLLKSCQVCPEDEDGGSNIFELTNGCLCCTVQEEFLPTMQELLKRRDSIDCIVIETSGLALPKPLVKAFRWQEIRNAATVDAVVTVVDCAAVASGTFASDLEAIAIQRQADDSLEHETPLQELFEDQLACADLVVLSKTDLVDAATKSQVEELVKQELPRVVKMVESDRGQLDPSILLGFQAAVEDNLDSRPSHHDTEEDHDHDDDITSTHLILDRDFDPEKLQQQLQTLTNQQEIYRIKGFVAVPNKPMRLVMQGVGNRFDKFYDRPWQPQEARQTRLVFIGRDLNSTEIESQLVAL

SEQ ID NO: 7779 - DNA, 1062 bp, Nostoc sp. PCC 7120
  CDS (1)..(1062): transl_table=11
atgaataccctaaccgcagaaacaacaaacataattcctgaaattcccaaacgaggaatgccagttacaatcattactggctttttaggcagtggtaaaacaactctactcaatcaaattcttaaaaataagcatgatttaaaagttgctgttctcgtcaatgagttcggtgatattaatattgatagccagttgttagtgtctgtagaccaagatatgctcgaactgagtaatggctgtatatgctgcactatcaatgatggtttagttgatgctgtttatcgggttttggaacgagaagaacgcatcgattatttagttattgaaactaccggtgttgctgacccattgcccattattttaacgtttttaggtacagagcttcgggatttgaccaatctcgactcaatcctgacagtcgtagatgcggaagcctttgaaccaaatcatttcgagagtgaagctgctttaaaacaacttacttatgcagacattattcttctgaataaaacagacttggctacttcagaaaaaattcaagcattagaagactatatccaaactgtcaaagatagtgcaagaatcctacatacaaaatatggtgaagtggctttacccttaattttaggtgttggtttaaccccaaaagatgattatactgctgatgatgcagaagatgctcacgaacataatcatgaacatcatagccatgaacacgaccatgaccatgaccatcatgagcataaacatcatcatgaacaccactctcatcatttagacaatgatggatttgtttcagtatcttttcagtctgataggccgtttgatgttcataaatttgagaattttctcacagaagaaatgcctcagaatgttttccgtgctaagggtattttgtggtttagtgatagtgagttacgccatatatttcaactgagtgggcctcgttataacttacacgctgatgaatggcatactttacctaagaaccaattggttttcattggtagaaaattaaatactaatcaaatttatacacaacttaacaattgtttggtatga

SEQ ID NO: 7780 - protein, 353 aa, Nostoc sp. PCC 7120
MNTLTAETTNIIPEIPKRGMPVTIITGFLGSGKTTLLNQILKNKHDLKVAVLVNEFGDINIDSQLLVSVDQDMLELSNGCICCTINDGLVDAVYRVLEREERIDYLVIETTGVADPLPIILTFLGTELRDLTNLDSILTVVDAEAFEPNHFESEAALKQLTYADIILLNKTDLATSEKIQALEDYIQTVKDSARILHTKYGEVALPLILGVGLTPKDDYTADDAEDAHEHNHEHHSHEHDHDHDHHEHKHHHEHHSHHLDNDGFVSVSFQSDRPFDVHKFENFLTEEMPQNVFRAKGILWFSDSELRHIFQLSGPRYNLHADEWHTLPKNQLVFIGRKLNTNQIYTQLNNCLV

SEQ ID NO: 7781 - DNA, 1275 bp, Ralstonia solanacearum GMI1000
  CDS (1)..(1275): transl_table=11
gtgctgtccggcttcctcggcgccggcaagaccacgctgctcaaccacgtgctcgccaaccgcgagggcaagcgcgtggccgtgatcgtcaacgacctgtcggacgtcaacatcgacgcgcagctcgtgggcgacggcaccgccacgagcgcccagctctcgcgcaccgatgagcgcatggtggagctgtccaacggctgcatctgctgcacgctgcgcgaggacctgctcgacgagatcgcccgcctggcgcgcgaagaccgcttcgactacctgctgatcgaatcgaccggcgtggccgagccgctgcccatcgccgagaccttcaccttcgaggatgccgaaggccggctgctgtccgacctggcccggctcgacaccatggtgacggtggtcgacgcccagcacttcctggccgactacgacgccgccgacttcctcgccgaccgcggccaggcccgcgacgaggacgatgaccgcaccgtggtcgacctgctgatcgagcaggtcgagttctgcgacgtgatcgtgctcaacaagaccgacctggtggacgaagccgagcgcgagcggctggccggcatcctgcattcgctgaacccgcgcgcgcgcatcctgccggcgtcgttcggccacgtgccgctggacgcgatcctgaacacccaccgcttcgatttcgacgccgccgccgccgcgcccgcgtggctggccgaactgcgcggcgaacacgtggccgagaccgaagcgctcggcatccgcagcttcgtctaccgccgccgccggcccttccacccgcagcgcctgtgggacctgatgcataccgaatggctgcgcgagcacggccgcgtgctgcgctccaagggctacttctggctggcgccgcgcatggacgtggccggcagctgggggcaggccggcggcgtgatgcgccacggcggcgccggtgcctggtgggccgccgtcgacacggccgaatggcccgacgaggacgaagcccgtaccgacatcgccgacaagatgctcgacaacggcgcgcccgcgccgtggggcgaccgccgccaggaactggtcttcatcggcatcgacctggacgaggccgcgctggcggcgagcctggacgcctgcctgctgaccgacgccgaattcgccgccggccccgcggcctgggccgagctgcccgacccgttccccgactggggcttcgacgacaaccacggcgaagcggaagacgaccacgcgcacggcgacgactgcgactgcggtcatccccactaa

SEQ ID NO: 7782 - protein, 424 aa, Ralstonia solanacearum GMI1000
MLSGFLGAGKTTLLNHVLANREGKRVAVIVNDLSDVNIDAQLVGDGTATSAQLSRTDERMVELSNGCICCTLREDLLDEIARLAREDRFDYLLIESTGVAEPLPIAETFTFEDAEGRLLSDLARLDTMVTVVDAQHFLADYDAADFLADRGQARDEDDDRTVVDLLIEQVEFCDVIVLNKTDLVDEAERERLAGILHSLNPRARILPASFGHVPLDAILNTHRFDFDAAAAAPAWLAELRGEHVAETEALGIRSFVYRRRRPFHPQRLWDLMHTEWLREHGRVLRSKGYFWLAPRMDVAGSWGQAGGVMRHGGAGAWWAAVDTAEWPDEDEARTDIADKMLDNGAPAPWGDRRQELVFIGIDLDEAALAASLDACLLTDAEFAAGPAAWAELPDPFPDWGFDDNHGEAEDDHAHGDDCDCGHPH

SEQ ID NO: 7783 - DNA, 1089 bp, Ralstonia solanacearum GMI1000
  CDS (1)..(1089): transl_table=11
atgtccaaactgatcccggtcaccatcctgacgggctttctcggcagcgggaagaccacactgctcaagcgcatcctgaccgaacagcacggcatgaagatcgccgtgatcgagaacgagttcggcgaggagaacatcgacaacgacatcctcgtgcaggacggcaacgagcagatcgtgcagatgagcaacggctgcatctgctgcaccatccgcggcgacctggtggccgcgctgtccgacctgctcacgcgccgcgacaagggcgagctgcagttcgaccgcgtggtcatcgagaccaccggcgtggccaacccgggcccggtcgcgcagaccttcttcatggacgacgagatcgccgcccgctacctgctggacgccgtcatcacgctggtcgacgccaagcacggcaaccagcagctcgacaggcaggaggaagcgcagcgccaggtgggcttcgccgacgcgatcttcatcaccaagggcgacctggtctccgacgacgacgtcgaggcgctgcgccaccgcctgctgcacatgaacccgcgcgcgccgatccgcaccgccaacttcggcgaggcgccgatcgacaccatcttcgacctgcgcggcttcaacctgaacgccaagctggagatcgaccccgacttcctgcgcgaggacgaccacgatcacgaccacggtcatgagcacaaccacgcctgctcgcccgactgcgatcacgatcacgagcatggccacgatcaccatcacgggcacggccatcaccaccatcacggccacgcgcaccataccgaccgcatcgcctcgttcgtcttccgcagcgaacggccgttcaactacaccaagctggaggaattcctctccggcgtgctcaacgtctacggcgagaagctgctgcgctacaagggcgtgctgtacatggagggcgtcgaccgcaaggtagtgttccagggcgtgcaccagctgatgggcagcgacgtgggcggcaagtgggacggcgagacgccgggcaaccgcatggtcttcatcggcgtggacctgccgcgcgacaccatcctgaagggcctggagaactgcctggcctga

SEQ ID NO: 7784 - protein, 362 aa, Ralstonia solanacearum GMI1000
MSKLIPVTILTGFLGSGKTTLLKRILTEQHGMKIAVIENEFGEENIDNDILVQDGNEQIVQMSNGCICCTIRGDLVAALSDLLTRRDKGELQFDRVVIETTGVANPGPVAQTFFMDDEIAARYLLDAVITLVDAKHGNQQLDRQEEAQRQVGFADAIFITKGDLVSDDDVEALRHRLLHMNPRAPIRTANFGEAPIDTIFDLRGFNLNAKLEIDPDFLREDDHDHDHGHEHNHACSPDCDHDHEHGHDHHHGHGHHHHHGHAHHTDRIASFVFRSERPFNYTKLEEFLSGVLNVYGEKLLRYKGVLYMEGVDRKVVFQGVHQLMGSDVGGKWDGETPGNRMVFIGVDLPRDTILKGLENCLA

SEQ ID NO: 7785 - DNA, 1104 bp, Ralstonia solanacearum GMI1000
  CDS (1)..(1104): transl_table=11
atgacccaacgcattcccgtcaccgtcttcaccggcttcctgggtgccggcaagaccacgctgctgtccggcctgatccgcgacaacaagcagcgccgcctggccatcctcgtcaacgaattcggcgaagtgtcgatcgacggcgcgctgctgcgcagcgacggcgagcgcggcggcgcggaggtccacgacctgtccaacggactgatcgcctacgacgacgatgccgatttcctgccgaccatgcaggcactgtggcagcggcgcggcacgatcgaccacgtgctgatcgagacctccggcctcgcgctgccgacagcggtgatggaaagcctgcagagcgaagcgctggcgccgtacttcgtgctggacgccacgctggccgtggtggacacgcccctgctgctgtcgggcggcttcgaccgcgcggccgacgacgacgccacgcaaacccccatcgccagcctgttcgagcagcagctcgccaacgcggacatcgtcgtgctcaacaagatcgacgcgctcggcgaagacgcccagctcgacgccgaggcgcgcgtgcgggcgctggcgccgtcggtgcgcttcatcgaactggcattcgacgcccggctcgacacgcggctcacgctcggcctgcgtctgcacgagccggccggcaccgcgcaccggcactacgggccggtggccaccctgcccgggctcaacctgcggccgctggccaaccagcgcctgctcgacggccacagccacggcggccagggcgcgcacagccacgggctggcgacgcacaagcatttccacgagcgcgatccgggctggcagtcgttcatggtccgcagccacgacgcgcaggacgccgacaccctgcgccacgccgtcgccgccatcacccgcagcgaaccgatcctgcgcgccaagggctttgcccgcgccggcgccggacgggtgctgatccaggcggtccgcaaccgggtggaagcccggctggaaccggatgccgcgccgcccaggcaggcccagctggtgttcatcggctaccacccgagccgcccgcgcgtggccgagcagctgcgcgaactcaccggcaccgactggcgctga

SEQ ID NO: 7786 - protein, 367 aa, Ralstonia solanacearum GMI1000
MTQRIPVTVFTGFLGAGKTTLLSGLIRDNKQRRLAILVNEFGEVSIDGALLRSDGERGGAEVHDLSNGLIAYDDDADFLPTMQALWQRRGTIDHVLIETSGLALPTAVMESLQSEALAPYFVLDATLAVVDTPLLLSGGFDRAADDDATQTPIASLFEQQLANADIVVLNKIDALGEDAQLDAEARVRALAPSVRFIELAFDARLDTRLTLGLRLHEPAGTAHRHYGPVATLPGLNLRPLANQRLLDGHSHGGQGAHSHGLATHKHFHERDPGWQSFMVRSHDAQDADTLRHAVAAITRSEPILRAKGFARAGAGRVLIQAVRNRVEARLEPDAAPPRQAQLVFIGYHPSRPRVAEQLRELTGTDWR

SEQ ID NO: 7787 - DNA, 1038 bp, Agrobacterium tumefaciens str. C58
  CDS (1)..(1038): transl_table=11
atgagcacccttctggaccgcgttccctgcaccatcgtcaccggctttctgggtgccggaaaaaccacactgctgcgcggtcttctcgaaaagcttgacggcaagcggctcgccatcatcgtcaatgaattcggcgatatcggcattgatggcgaaattctgaaaggctgcggcattgaaagctgcccggaggaaaacatcgtcgagctggccaatggctgcatctgctgcacggtggcggatgatttccagcccgccatcgaacaaatccttagccgccagccgaaggtggagcatattctcattgagacctccggccttgccctgccgaagcccctggtgcaggccttccagtggccggccatcaaaagccgcgtgactgtcgatgccgtggtcgccgtggtggatggcgcggctctggccgagggtcaggtcgcccacgacatggaagcgcttgctgcccagcgtgccaacgacgaagcgctcgaccatgacgatccggtcgaagaggtcttcgaagatcaggtcgcctgcgccgatcttatcgtgctcaccaaggccgatcttctcgacgatgccggcctcgagaaggccaaggcccatatcctcgaacatctgccaaaggcggcgaagatcgttgttgcttcgaatggtgccatcgatccgaccgtgctgatcggtctcggccttgcggtggaagaggatattgaaaaccgccgcacccatcatgatggcgaactcgatcatgaacacgatgatttcgacagcttcgtcatcgacctgccggccgttaccgatccggaggcgctggcggcccgtatcgcgcagacggccgctgccgagaatgtgctgcgcatcaagggcttcatcgaagtcgccactaagcccatgcgtctgcaggtgcaggctgtcggcagccgcgtcaaccactactacgaccgcccctgggcggcgggtgaagagcgccgcagccgtctcgtcgtcatcggcgaaaagggcattaaccgcgaaaagatcgaacagatgctggccgcctga

SEQ ID NO: 7788 - protein, 345 aa, Agrobacterium tumefaciens str. C58
MSTLLDRVPCTIVTGFLGAGKTTLLRGLLEKLDGKRLAIIVNEFGDIGIDGEILKGCGIESCPEENIVELANGCICCTVADDFQPAIEQILSRQPKVEHILIETSGLALPKPLVQAFQWPAIKSRVTVDAVVAVVDGAALAEGQVAHDMEALAAQRANDEALDHDDPVEEVFEDQVACADLIVLTKADLLDDAGLEKAKAHILEHLPKAAKIVVASNGAIDPTVLIGLGLAVEEDIENRRTHHDGELDHEHDDFDSFVIDLPAVTDPEALAARIAQTAAAENVLRIKGFIEVATKPMRLQVQAVGSRVNHYYDRPWAAGEERRSRLVVIGEKGINREKIEQMLAA

SEQ ID NO: 7789 - DNA, 1203 bp, Agrobacterium tumefaciens str. C58
  CDS (1)..(1203): transl_table=11
atgaaaaaactccctgtcaccgtcctctccggctttttaggcgctggcaaaaccacccttctcaaccacatcctcgccaatcgcgatggcctgcgcgtggcgttgatcgtcaacgatatgagcgagatcaacatcgatgcggcgctggtgcgcgatggcggcgccaatctttcccgcaccgaggaacagctggtggaaatgaccaatggctgcatctgttgcacgttgcgcgatgaccttctgaccgaggtgcgtgcgctcgccgaacagggccgattcgattatctcctgatcgaatccaccggcatcgccgagccacttcccgtggccgccaccttcgatttccgcgatgagaacggccgcagcctgtcggatgttgcgcagctggatacgatggtgacggtggtggatgccgccaatcttctcaatgattacggttcgtccgattttctggccgaccggggcgaaacggcgggtgatggcgacaaccgcaccattgtcgacctcctggtagagcagatcgaatttgccgatgtggtcgtcctcaacaagatcggcaccgccacgccggaggaacgggatgcggcccgcaagatcattgtcgggctgaacccggatgcaaaactcatcgaggcggatttcggcaaggtggaactgaaggaggttctggggaccggccgcttcgatttcgccagggccgaagaacatcccctctggttcaaggagctgcatggcttcaaggaccacattccagagaccgaggaatatggcatccgctccttcgtttaccgcgccaaaaagcccttcgaccccgtactcttccagcgcttcatcgatcgtgcctggccgggcgtggtgcgcgccaagggtttcttctggctggcgacacggccgcgttatgtcggtgagatcagccaggcgggcgcattggttcgcaccggcaagatgggtttgtggtggtccgccgtgcccagggaacaatggccgcgcgaaaagcagttcctcgacatgatggaaccctatctcgacccgaccttcggtgaccggcggcaggaaatcgtgttcatcggttccgatccgatgagcgaggcccgcatccgggcgcagctggatgcctgcctgatcgatactgaggccttcacgccggacgcctggcggcacctgcccgacccctttgcgaactgggatagacaggcggcctga

SEQ ID NO: 7790 - protein, 400 aa, Agrobacterium tumefaciens str. C58
MKKLPVTVLSGFLGAGKTTLLNHILANRDGLRVALIVNDMSEINIDAALVRDGGANLSRTEEQLVEMTNGCICCTLRDDLLTEVRALAEQGRFDYLLIESTGIAEPLPVAATFDFRDENGRSLSDVAQLDTMVTVVDAANLLNDYGSSDFLADRGETAGDGDNRTIVDLLVEQIEFADVVVLNKIGTATPEERDAARKIIVGLNPDAKLIEADFGKVELKEVLGTGRFDFARAEEHPLWFKELHGFKDHIPETEEYGIRSFVYRAKKPFDPVLFQRFIDRAWPGVVRAKGFFWLATRPRYVGEISQAGALVRTGKMGLWWSAVPREQWPREKQFLDMMEPYLDPTFGDRRQEIVFIGSDPMSEARIRAQLDACLIDTEAFTPDAWRHLPDPFANWDRQAA

SEQ ID NO: 7791 - DNA, 1152 bp, Agrobacterium tumefaciens str. C58
  CDS (1)..(1152): transl_table=11
atggtgctgcgaatatgtgaatcgcagggtgcagacgtgttcggaatcacacgaaagaaggcatttgaacgcaaggaggattcggctgtagcgccaccggttcagacggtgcccgtcaccttgctcaccggctttctcggtgccggcaagaccaccttgctgaacgagcttctggccgcgccggccatgcgcgatgcggccgtcatcgttaatgaattcggctcggtgcccatcgatcacggtctggttcgaaccggttcggagcgttatttccacaccacgactggctgcatctgctgcaccgcctccagcgatatccgcacctcgctttacgaattgcatcaggtctctctcgagggggtgatgcctgaaatatcgcgggtcgtgatcgagaccaccggccttgccgatcccgcaccgatcatcaacagcctgattgccggcggaacgccggcgcttggcctgcgtgaccatatcgttgcccgccactttcatctttcgggcgtggtcacggtttttgatgtcatctcgggccgggcgatgctcgacagtttcatcgagggctggaaacagctggcctttgccgatcacatcgttcttaccaagaccgatctcgccgatgcggcggcaatcgaccagaagagcctcaccgatctcaatcccgccgcccacctgcatgaccgcaacgcggccgatttcgatctcatgtcgcttttctcaacgaaggattattcgctgcacggcaagacggaggacgtgccggggtggctggccgccgacaggctgagccttcatgccggccatgatcacgacatcaatcgccatggtgccggggtagaggccttcgacctcaccttcgacggcgcgctcgatccgcaggcgatcgtcacctttctcgaacttgtcaccagcaatgtgcattccggcctgctgcggctcaagggaattttcggcgcgactgacgacccggagcggccggttgtcgcccacgccgtgcagcaccggctttatcccctgatccggctggaaagctggccggatggcgatcgttcgacccgcatcgtcatgatcggcatggatgtgccgcaacagccgattcgcgacctattcaacgcattggccgcgcaggcggggcgaaagggcagggcatga

SEQ ID NO: 7792 - protein, 383 aa, Agrobacterium tumefaciens str. C58
MVLRICESQGADVFGITRKKAFERKEDSAVAPPVQTVPVTLLTGFLGAGKTTLLNELLAAPAMRDAAVIVNEFGSVPIDHGLVRTGSERYFHTTTGCICCTASSDIRTSLYELHQVSLEGVMPEISRVVIETTGLADPAPIINSLIAGGTPALGLRDHIVARHFHLSGVVTVFDVISGRAMLDSFIEGWKQLAFADHIVLTKTDLADAAAIDQKSLTDLNPAAHLHDRNAADFDLMSLFSTKDYSLHGKTEDVPGWLAADRLSLHAGHDHDINRHGAGVEAFDLTFDGALDPQAIVTFLELVTSNVHSGLLRLKGIFGATDDPERPVVAHAVQHRLYPLIRLESWPDGDRSTRIVMIGMDVPQQPIRDLFNALAAQAGRKGRA

SEQ ID NO: 7793 - DNA, 1236 bp, Agrobacterium tumefaciens str. C58
  CDS (1)..(1236): transl_table=11
atgtcgctcgtggcttccagccacgggcgatttcttttcgttccgtgcggctcccggtcttgtctagcattatgtcatgccggggggcagccatcaccatacaggcaaggcatgtctcgcgatcgcatcccggtttccattatcaccggctttcttggcgccggaaaatcgacgctgctcaaccgtcttctcaaagatccggagatgagcgatgctgcgattatcatcaatgaattcggcgatgtcagtatcgaccacatgctggttgaaagcgctggcgaaggcatcattgagttggccgaagggtgcctctgctgcactgtcaggggtgaactggtggatacgctggctgaactgattgatggtatccagaccggcaagctgaagccggtcaaacgggttgtgatcgagacgaccggtcttgccgatcccgcccccgtcatgcagtcggtcatgggcaatcctgtcatcgcgcagaatttcgtgctgaacggcatgatcacggtggtggatgccgtcaatggcctgtccacactcgacaatcacgaggaagcggtgaagcaggcggccgtggccgaccggctggtgatgaccaagcggacgctcgccgatgcttctgcgattgccgccctgacggcgcgtcttgaggcgctaaacccgcgtgcgacaatcgaggatggcgacaaggccgactggagtgctgccgggcttctcgacaatggcctttatgatgtctccagcaaaaatgccgatgtcggccgctggctgggcgaagagtccggccatggtcatcatgatcatgatcatgaccacgatcacgcgcacggccatcaccaccatcatgatgtgaaccggcatgacgcgtcgatccggtccttctcgatcattcacgatcagccgatcgatccgatggcgatcgatatgttcgtggatctgctgcgctcggcccatggcgaaaagctcttgcgcatgaaggccatcgtcaagctgtcggataatccggggcggcctttggtactgcatggggtgcaaaacattttccacacgcccgagcgcctggcggcctggccggacccgaccgatcagcgcacgcgcatggtactgatcacgaaggatttgccggaggctttcgtgaaagacctgtttgctgccttcaccggcacaccgggtattgaccggccggacaggcaggcgatgacggataatccgctggcggtttcggggttgcggttttag

SEQ ID NO: 7794 - protein, 411 aa, Agrobacterium tumefaciens str. C58
MSLVASSHGRFLFVPCGSRSCLALCHAGGQPSPYRQGMSRDRIPVSIITGFLGAGKSTLLNRLLKDPEMSDAAIIINEFGDVSIDHMLVESAGEGIIELAEGCLCCTVRGELVDTLAELIDGIQTGKLKPVKRVVIETTGLADPAPVMQSVMGNPVIAQNFVLNGMITVVDAVNGLSTLDNHEEAVKQAAVADRLVMTKRTLADASAIAALTARLEALNPRATIEDGDKADWSAAGLLDNGLYDVSSKNADVGRWLGEESGHGHHDHDHDHDHAHGHHHHHDVNRHDASIRSFSIIHDQPIDPMAIDMFVDLLRSAHGEKLLRMKAIVKLSDNPGRPLVLHGVQNIFHTPERLAAWPDPTDQRTRMVLITKDLPEAFVKDLFAAFTGTPGIDRPDRQAMTDNPLAVSGLRF

SEQ ID NO: 7795 - DNA, 1128 bp, Agrobacterium tumefaciens str. C58
  CDS (1)..(1128): transl_table=11
atgaccgaaacagcaccagccaagcccattccagtcaccgtcctgacgggatatctcggcgccggcaagacgacgcttctcaaccgcattctctccgagaaccacggcaagaaatacgctgtcatcgtcaatgaattcggcgagatcggcatcgacaacgatctgatcgtcgaatccgacgaggaaatctacgaaatgaacaatggctgcgtgtgctgcacggtgcgcggcgacctcatccgcgtcgtggaaggcctgatgcgccgtcccggccgtttcgacggcatcatcgtcgagacgacaggccttgccgatccggtgcccgtcgcccagaccttcttcatggatgacgacgtgcgcgccaagaccgagcttgatgccgtcgttgccctcgttgacgccaagcacctgccgctgcgcctgaaggacagccgcgaggctgaagaccagatcgcctttgccgatgtcgtcgtcgtcaacaagaccgacctcgtgacgccggaagaagtcgcccgcatcgaagatatcgtgcgtgccatcaatccttccgcccgcatctacaagaccacccgttccggcgtcgatctcgcccgggttctcgatcagggcgccttcaacctggaacgtgcactcgaaaacgatccgcatttcctcgagcacggccacgaggatcatgcctgcggccccgattgcgatcatcaccatcatgatcatgggcacgatcacggccatgaccaccatcatcacgaccatgaccacgggcatcatgaccatgcgcacgaccatggccacgatcaccaccacggcgcggtctcgccgatccatgatgtgacagtgcagtcggtttcgctgcgcggcggcgaaatgaaccccgagcggttcttcccgtggatccagaaggtcacccagaccgatggcccgaacatcctgcgcctcaagggcatcatcgccttcaagggcgatgcggaacgttacgtggtgcagggcgtgcacatgatcatcgagggcgaccaccagcgcccgtggaaggaagacgaaaagcgcgaaagccgcctcgtcttcatcggccgcgaactggatcgcgagaagctggaaaacagcttcaaagcctgcctcgcgacggcctga

SEQ ID NO: 7796 - protein, 375 aa, Agrobacterium tumefaciens str. C58
MTETAPAKPIPVTVLTGYLGAGKTTLLNRILSENHGKKYAVIVNEFGEIGIDNDLIVESDEEIYEMNNGCVCCTVRGDLIRVVEGLMRRPGRFDGIIVETTGLADPVPVAQTFFMDDDVRAKTELDAVVALVDAKHLPLRLKDSREAEDQIAFADVVVVNKTDLVTPEEVARIEDIVRAINPSARIYKTTRSGVDLARVLDQGAFNLERALENDPHFLEHGHEDHACGPDCDHHHHDHGHDHGHDHHHHDHDHGHHDHAHDHGHDHHHGAVSPIHDVTVQSVSLRGGEMNPERFFPWIQKVTQTDGPNILRLKGIIAFKGDAERYVVQGVHMIIEGDHQRPWKEDEKRESRLVFIGRELDREKLENSFKACLATA

SEQ ID NO: 7797 - DNA, 1167 bp, Brucella melitensis 16M
  CDS (1)..(1167): transl_table=11
atgcctgatcccattcccgtttccgtgctgaccggctttcttggctccggcaagacgacgctgctcaaccggcttttgaaagatccggcgctcagcgatacagcagtcattatcaacgagttcggcgaggtgagcattgaccatctgctggtcgagcaggcgagcgagggcgtgatcgagctggctgacgggtgtctgtgctgcacagtgcgcggtgaactggtcgatacgctggccgatctcatcgaccggttgcagaccggccgcatcaaggcgctgaagcgcgtcatcatcgaaaccacggggcttgccgatccggccccggtgctgcattcgatcatgggtcatcctcttctcacgcaggttttccggcttgatggcgtgctggctaccgtggatgcggtgaacggcatggcaacgctcgacaatcatgaggaagccgtcaaacaggcagccatggccgaccgcatcatcctcaccaagaccgatctgccggaagcacaggctggcttgccggcattgaaggcacggttgcgcacgcttaaccccggagccgatattctggaagcgggggaagagcgcacaggctatgccgcgctttttgaatgcgggctttataacccgcagacgaaatcggcggatgtgcggcgctggcttaaggccgaagcctatgaggacgagcatcatggccatgtgtgcgggccggattgcggtcacgaccatcatcaccacgatcaccatcacgatcaccataacgatcagggctatgcgcatcatcatcatcatgacgatgcgatccgttcgttttcactgcgccatgatgcgccgatcccggtttcgaccttcgagatgtttctcgatcttctgcgttcgacccatggtgaaaagctcttgcgcatgaagggtatcgtgcagattgccgaagacccggaccgcccggtcgtcatccatggtgtgcagaagattttccatccgcccgcgcgcctgccgcaatggccgcaaggcaagcgcgaaacgcttctggtcctgattgtgaaggacttgccggaggcctatgtgcgggaacttttcgatgcctttctgggccggcccggcctcgacaggcccgaccgcgcagccatgactgaaaatccgctggccattccggggttctcaccccgccggtaa

SEQ ID NO: 7798 - protein, 388 aa, Brucella melitensis 16M
MPDPIPVSVLTGFLGSGKTTLLNRLLKDPALSDTAVIINEFGEVSIDHLLVEQASEGVIELADGCLCCTVRGELVDTLADLIDRLQTGRIKALKRVIIETTGLADPAPVLHSIMGHPLLTQVFRLDGVLATVDAVNGMATLDNHEEAVKQAAMADRIILTKTDLPEAQAGLPALKARLRTLNPGADILEAGEERTGYAALFECGLYNPQTKSADVRRWLKAEAYEDEHHGHVCGPDCGHDHHHHDHHHDHHNDQGYAHHHHHDDAIRSFSLRHDAPIPVSTFEMFLDLLRSTHGEKLLRMKGIVQIAEDPDRPVVIHGVQKIFHPPARLPQWPQGKRETLLVLIVKDLPEAYVRELFDAFLGRPGLDRPDRAAMTENPLAIPGFSPRR

SEQ ID NO: 7799 - DNA, 1050 bp, Brucella melitensis 16M
  CDS (1)..(1050): transl_table=11
atgcagggacagaaaattccggcaacggtcatcacgggttttctcggatcgggcaagacaaccatgatccgcaacttgctggaaaatgccaatggcaagcgcatcgcactgattatcaacgagttcggcgatctcggcgtcgatggcggcattctgaaacgctgcgggatcgaaacctgccgggaggaagatgtcatcgagctcaataatggctgcatctgctgcaccgtggccgatgatttcattccgaccatgacaaagcttctggaccgggaagaccggcccgaccatatcgtgatcgaaacctccggtcttgccttgccgcagccgctggtggccgccttcaactggccggagatcaagacgcaggtgacggttgatggcgtggtgacggtgatcgatgccgccgccgtggcggaaggccgttttgccgacgaccatgacaaggtggatgcgcagcgcgcagccgatgaatctcttgaccatgaaagccccttggaggaactttttgaggatcagattcatgccgccgacctcattgttctcaacaaggccgacctgatcgatgctgcgaaactggatagcgtgaaggcggatgtggcggagcgttcgtcacgccgggtgaatatggtgcctgcaagcttcggcaagcttggtgcggatgttctgctggggcttggcgttgggacggaagacgatatcgtcaaccgtcgctcgcatcatgaagcccatcatggagacggccacgagcatgatcatgacgagtttgagagttttgtggtggaggccggttcggttgccgatccgaaggcttttgcggaaaagctgaaggctgtgattgccgaacacgatattcttcgcctgaagggttttgtggatgtgccgggcaagccgatgcgccttgtggtgcaggcggtggggccgcgtatcgaacattatttcgaccggccatggggcaaggatgaaacacgctcgacccggctggtggtgattggcctgcacgatattgacgaagcagccatcgcccaggccgtgaaagatgccgactga

SEQ ID NO: 7800 - protein, 349 aa, Brucella melitensis 16M
MQGQKIPATVITGFLGSGKTTMIRNLLENANGKRIALIINEFGDLGVDGGILKRCGIETCREEDVIELNNGCICCTVADDFIPTMTKLLDREDRPDHIVIETSGLALPQPLVAAFNWPEIKTQVTVDGVVTVIDAAAVAEGRFADDHDKVDAQRAADESLDHESPLEELFEDQIHAADLIVLNKADLIDAAKLDSVKADVAERSSRRVNMVPASFGKLGADVLLGLGVGTEDDIVNRRSHHEAHHGDGHEHDHDEFESFVVEAGSVADPKAFAEKLKAVIAEHDILRLKGFVDVPGKPMRLVVQAVGPRIEHYFDRPWGKDETRSTRLVVIGLHDIDEAAIAQAVKDAD

SEQ ID NO: 7801 - DNA, 1119 bp, Brucella melitensis 16M
  CDS (1)..(1119): transl_table=11
atggccgaagccgaggcaacagcaaccactgaagctggccgcattcccgttaccgttctgaccggatatctgggctcggggaaaacgacccttctcaatcgcatcctgaccgaaaaccacggcaagcgctatgccgtcatcgtcaatgagttcggcgaaatcggcatcgataacgacctcatcgtcgaatcggacgaagaaatctacgagatgaacaatggctgcatctgctgcaccgtgcgcggcgacctgatccgcgtggtggaaggcctgatgcgccgccccggacgttttgacgccattgtggtggagacgacgggccttgccgatccggttccggttgcgcagacttttttcatggatgacgacgtgcgcgccaagaccgggcttgatgccgttgtcgcccttgtggatgccaagcacctgccgctgcgcctgaaggacagccgcgaggcggaagaccagatcgcatttgccgatgtcgtgctcatcaacaagaccgacctcgtgacgccggaagaactggcggcggtcgaagccaccgtgcgcgccatcaacccgcacgcaatcatccaccgtaccgagcgcgcatcgattccgctcgaccgcgtgctggaccgtggcgccttcgacctgaagcgcgttctggacaatgatccgcacttcctcgaccatgacgacccggaccatgtctgtggccccgattgcgaccacgatcatcatcaccatgggcatgaccatcaccatcatgatcatcacgatcacgaccatgtttgcgggccggactgcgaccacgatcacgatcatgcctcgcccatccacgacgttacggtgaagtccgtttcgctgcgaacaggtgaaattgatccggcgaaatttttcccatggatccagaacattacccagacgcaaggcccgaatatcctacgcctgaaaggcatcatcgccttcaaggacgatccggaccgctatgtcgtgcagggcgtgcacatgattatcgaaggcgatcaccagcgcgcgtggaagccggaagaaaagcatgaaagccgcctcgtcttcatcgggcgcgagcttgatccggcggcattgaaagccggttttgagaactgccgggcctga

SEQ ID NO: 7802 - protein, 372 aa, Brucella melitensis 16M
MAEAEATATTEAGRIPVTVLTGYLGSGKTTLLNRILTENHGKRYAVIVNEFGEIGIDNDLIVESDEEIYEMNNGCICCTVRGDLIRVVEGLMRRPGRFDAIVVETTGLADPVPVAQTFFMDDDVRAKTGLDAVVALVDAKHLPLRLKDSREAEDQIAFADVVLINKTDLVTPEELAAVEATVRAINPHAIIHRTERASIPLDRVLDRGAFDLKRVLDNDPHFLDHDDPDHVCGPDCDHDHHHHGHDHHHHDHHDHDHVCGPDCDHDHDHASPIHDVTVKSVSLRTGEIDPAKFFPWIQNITQTQGPNILRLKGIIAFKDDPDRYVVQGVHMIIEGDHQRAWKPEEKHESRLVFIGRELDPAALKAGFENCRA

SEQ ID NO: 7803 - DNA, 927 bp, Clostridium perfringens str. 13
  CDS (1)..(927): transl_table=11
atgaaagtagatataatttcaggattcctaggagctggcaaaactactttaataaaaaagcttttagataccttagtaaaggatgaaaaggtagctattgtggaaaatgaatatggagaagttggaattgatggagatttacttaaagatagaagaattgaagtaaaagaaattaattctgggtgtatatgttgcaccataaagggtgactttaaacaaaatatcttagacataatatcaaattacagaccagatagagtcataattgaaccttcaggagtagctaatttttctcaagttcttgaatctataaaagaagctcatatagagggtttaagaataaatatgaaaataaccatggttgatgctcaaaatgttcatatgtatatgaaaaactttggagatttttatagaagtcaattagtaaatgcaaacacaataatattaactagggtagaaaaactttctgataaggaaattactcatgtttgtaatgaaataaaaacaataaacaataaagctaacattataaccactgagttaagtaagttaagcccagaaagaataattcaagtttcagagaaaaaagttgaaagtttaatagagaatataaatattaaaaagcctaaaagaataggtctaagaagagtttctgcacctgagttttttgaaaattggggagtggagacaccaaaaacatttgaatattctgagttagtaaaaattttaaatgaatttcaaaataacaagcatggtgaggttttaagggcaaaggggataataaaatctaaagataataagtggtttaaatttgactttgtaccaaatgatatttctattgttaattacaaaagtgattatacaggtagagtttgtgttataggaagaaatttaaataaagatagtatagataaattattttcttaa

SEQ ID NO: 7804 - protein, 308 aa, Clostridium perfringens str. 13
MKVDIISGFLGAGKTTLIKKLLDTLVKDEKVAIVENEYGEVGIDGDLLKDRRIEVKEINSGCICCTIKGDFKQNILDIISNYRPDRVIIEPSGVANFSQVLESIKEAHIEGLRINMKITMVDAQNVHMYMKNFGDFYRSQLVNANTIILTRVEKLSDKEITHVCNEIKTINNKANIITTELSKLSPERIIQVSEKKVESLIENINIKKPKRIGLRRVSAPEFFENWGVETPKTFEYSELVKILNEFQNNKHGEVLRAKGIIKSKDNKWFKFDFVPNDISIVNYKSDYTGRVCVIGRNLNKDSIDKLFS

SEQ ID NO: 7805 - DNA, 1236 bp, Schizosaccharomyces pombe 972h-
  CDS (1)..(1236)
atggactttgaaattgaaaacgagtcggaaattccacagctggttgacgttgaagaggttaacacacaaccgcattcggaaacattaagcgtacctacggtttcgtccaataatgatattgattcatttgagcagcaatcagattttcttctagttgatcatgactctaccttggacccagtccctgtcacaatactgacgggctttttgggtgccggtaaaacttctttgctacggtcaattcttgaaaatcgaaatggtaaaagggttgctgtattaatgaatgaggtgggtgattcgggagaccttgaaaggagcttaatggaggatgttggaggagaagaactttatgaagagtgggtggctctttcaaatgggtgcatgtgttgcactgtgaaagacaatgggattaaagctttggaaaaaattatgaggcaaaaggggagatttgataacattgtaattgaaacaacgggtatagccaatcctggtcctcttgctcaaacattttggttggacgacgcgttgaaaagcgatgtcaagttagatggcatcgttactgttattgattgtaaaaatatagataatatcttaaaggatgaaagtgatattggttttattcaaatttcacatgctgattgtttgatcttaaacaaaacagatcttatttcttctgaagcattatctgtggtacgtcaaactatattgaagatcaattgcttagcgaagattattgaaacaacatatggacggttggatgacatttctgaaattttggacttggatgcatacggcaacgaaaatacttctaatcttgagtggtcgattcaaaggagcaatgatagcaatattaattgttctacttgtttggacgtggattgccaacatttgcattctctcgatacgcatagccttgatatctcaactcatacttttaaactgcccccactaatgtcgaaagaggtttttcagcaatttctacaatgggttcgtcatacactttggtcttgtttggaggaaggggaagacgaggagtttatgatttatcgaagtaaaggaatttttaataaagacgatggctcttggtacatctttcagggtgttcgcgaagtattcgaaattatgccgctgtcggagaagcctcgagcatttttagaaaaggatatccatcccgaaattatcctaattgggcgtaatctacatcgaatatctcctttcgtcgtcggaaaccaataa

SEQ ID NO: 7806 - protein, 411 aa, Schizosaccharomyces pombe 972h-
MDFEIENESEIPQLVDVEEVNTQPHSETLSVPTVSSNNDIDSFEQQSDFLLVDHDSTLDPVPVTILTGFLGAGKTSLLRSILENRNGKRVAVLMNEVGDSGDLERSLMEDVGGEELYEEWVALSNGCMCCTVKDNGIKALEKIMRQKGRFDNIVIETTGIANPGPLAQTFWLDDALKSDVKLDGIVTVIDCKNIDNILKDESDIGFIQISHADCLILNKTDLISSEALSVVRQTILKINCLAKIIETTYGRLDDISEILDLDAYGNENTSNLEWSIQRSNDSNINCSTCLDVDCQHLHSLDTHSLDISTHTFKLPPLMSKEVFQQFLQWVRHTLWSCLEEGEDEEFMIYRSKGIFNKDDGSWYIFQGVREVFEIMPLSEKPRAFLEKDIHPEIILIGRNLHRISPFVVGNQ

SEQ ID NO: 7807 - DNA, 1185 bp, Rattus norvegicus
  CDS (1)..(1185)
atgttacctgctatgaaaaccgtggaggcggaagaagagtacgcggaggattgtcccgaattggtccccattgagaccaagcaccaagaaaaagaagaaaatcttgacttcatcattaagattccagtcacaattgtcaccgggtatttaggtgctggaaagacaacacttctgaattacattctgacagaacaacataataggaaaatagcagtgatcttaaatgaatttggagaagggaatgcagtagagaaatccttagctgtcagtcaaggaggagaactctatgaagaacggctggaacttagaaacggttgcctctgctgttcggtcaaggacaatggccttaaagctatagagaatctgatgcagaagaagggcaagtttgattacatactcttagagaccactgggctagcagatcctggtgcagtggcttctatgttttgggttgatgctgagttaggaagtgatatttatcttgatggcatcataactgttgtagattcaaaatatggattaaaacatttaactgaagaaaaacctgatggccttgtcaatgaagctactaggcaagttgctttggcagacatgattctcatcaataaaacagacttggtttcagaagaggagctaaacaaattgagaacaactatcagatcaataaatggactgggaaaagttttagaaactcaaagatcaagaactcatctctcaaatatattagatcttcatgcctatgacactctctctggtataagtttgcagaaaaaactccagcatgtgtcaacggcaccccaccttgatcagagcattgttacagtcacatttgacgtaccaggaagtgcagaggaagagagtctaaatgtatttatccagaatctcctgtgggaaaagaatgtgaagaacaaggacggccgctgcatggaggtcatccggctgaagggcctggtgtctatcaaagacaaaccacagcaaatgattgtgcaaggcatccatgagctgtacgagctggaagagagccgagtgaactggaaggacgatgccgagagagcctgccagctggtctttattggtaaaaatttagataaggatattcttcaacaactcttcatcactgctgtggcagagacaaaagaacaaacgacagcaccaggccaagatggagcctgtccgccgcactag

SEQ ID NO: 7808 - protein, 394 aa, Rattus norvegicus
MLPAMKTVEAEEEYAEDCPELVPIETKHQEKEENLDFIIKIPVTIVTGYLGAGKTTLLNYILTEQHNRKIAVILNEFGEGNAVEKSLAVSQGGELYEERLELRNGCLCCSVKDNGLKAIENLMQKKGKFDYILLETTGLADPGAVASMFWVDAELGSDIYLDGIITVVDSKYGLKHLTEEKPDGLVNEATRQVALADMILINKTDLVSEEELNKLRTTIRSINGLGKVLETQRSRTHLSNILDLHAYDTLSGISLQKKLQHVSTAPHLDQSIVTVTFDVPGSAEEESLNVFIQNLLWEKNVKNKDGRCMEVIRLKGLVSIKDKPQQMIVQGIHELYELEESRVNWKDDAERACQLVFIGKNLDKDILQQLFITAVAETKEQTTAPGQDGACPPH

SEQ ID NO: 7809 - DNA, 1089 bp, Corynebacterium glutamicum ATCC 13032
  CDS (1)..(1089): transl_table=11
atggccacaacgaccccagtcaccgtgctatcaggatttctcggctccggaaaaaccacattgctcaaccagatcctccaccaccgaggatcccggaaaatcgcagtcattgtcaacgatttttcagaaatcaacatcgacgcagccctcatcgcatccgaaggccacctcacccgcggcgaagaccgcttcgtggaactgaccaacggatgcatctgctgcaccctgcgcgaagacctcgtggattccgtcggcgaactcgccagcagcgaccgcttcgaccacatcgtcatcgaatccacgggtatctccgaaccaatgccggtagccgccacatttgaatggcagtgggatgacggcacccgcctggctgacaaagcaccgatcgacaccatggtcaccctggtcgatgccacccaattcatcgacctcatccgcaaaaacacctccctcaccgaggctgacatgggcgcaaccgaggacgatgaacgcaccatcgccgacctactcaccgatcaaatcgagttcgccgaccgcatctacatcaccaaatccgacctggtggaccgcactgtcctcgagcaaacccgcgcactaatcgccagcatgagtccacgcgcccgcattgacttactcatcgatggcctcaatgacggctcccccatcaccgacgacatcctcggagctttcctctacgacgaagccaccgcccgcgcctacgagggctacacggaagaactcgaaaacccgcacactcccgaaaccgaggaatacggcatcagttccgtggtattccgctctgaccggccgttcaacaaggatcgcctacttcaggtactgcgttccaccactggactcgttcgctccaaaggctattgctggatcgctgatcacctcaacatcgtccaggtctggcaccaagccggccccaatttgagcattcgcccggccgcctattgggccaattcagagatcacccccggcactgaattggtcctgatcggcatccacatcgacggccccaccttgctcgcactgctacaaggcgcgacgcttaccgatgcggaagtggcggcactggttttgtga

SEQ ID NO: 7810 - protein, 362 aa, Corynebacterium glutamicum ATCC 13032
MATTTPVTVLSGFLGSGKTTLLNQILHHRGSRKIAVIVNDFSEINIDAALIASEGHLTRGEDRFVELTNGCICCTLREDLVDSVGELASSDRFDHIVIESTGISEPMPVAATFEWQWDDGTRLADKAPIDTMVTLVDATQFIDLIRKNTSLTEADMGATEDDERTIADLLTDQIEFADRIYITKSDLVDRTVLEQTRALIASMSPRARIDLLIDGLNDGSPITDDILGAFLYDEATARAYEGYTEELENPHTPETEEYGISSVVFRSDRPFNKDRLLQVLRSTTGLVRSKGYCWIADHLNIVQVWHQAGPNLSIRPAAYWANSEITPGTELVLIGIHIDGPTLLALLQGATLTDAEVAALVL

SEQ ID NO: 7811 - DNA, 1065 bp, Methanosarcina acetivorans C2A
  CDS (1)..(1065): transl_table=11
atgaaagtcatgatcataggaggttttctcggaagcgggaaaacaactgcaattcagaaaataagcagacaactcagtgatgccggaaaacggattgctattatcgtaaatgaaatcggagaaatagggcttgacggagataccctcaaaagccctgacatcaaaactgaagaattgacaagtggctgcatatgctgcaccttaaaaatcagtatgcagtacactcttcagacccttgaagaagaattcaggcctgagattgtgattatcgaaccgacaggtattgcttttccagggcagataagggaagaaatcgagataatggggctctccgaattgtcctttgccccgattgtgaccatagtagacccggggcgtttcggcaccgaagcaaaagaaatccccaggtttattgagacccaggtaaaagaagccgaaatcctcgggataaataaggtggacatagcccctgcggaaatagttatggcaacagaacagatgcttaccgaactgaaccctgaagctaaaattctgaagttttcggcaaaactgggagatgaacagttcgaaaacctgctcgcccacctttcggttcccgggaccgcgaaacctccacaggaaaagcaaaattccattgaaatttcggaagtttcggcccactcggtactctataccttcaaggtctgcagccttaaccctgaaaaaggcaggttccttattgaagagagccttcaaaccataagggacagggtagaagaaatgaaccccgaatttatagggcatatcaaactttccctgaagctcccggacttcatggtaaagggcagtgtgacatcctcagaagaaactccgcaggtggaatttattccccgcaaaaatgaaaagttcgaactcaggctgctctccgcaattacaaaggttccgaaagacaggctcagaaatatcgtggaaagcacacttgaagcaaagttgaaggaatcagacatatcttttgagaaaaaggaactgcaccacggcacgcttacgaaaatcgacgggctcatgaaaaagaaggtttcgtattaa

SEQ ID NO: 7812 - protein, 354 aa, Methanosarcina acetivorans C2A
MKVMIIGGFLGSGKTTAIQKISRQLSDAGKRIAIIVNEIGEIGLDGDTLKSPDIKTEELTSGCICCTLKISMQYTLQTLEEEFRPEIVIIEPTGIAFPGQIREEIEIMGLSELSFAPIVTIVDPGRFGTEAKEIPRFIETQVKEAEILGINKVDIAPAEIVMATEQMLTELNPEAKILKFSAKLGDEQFENLLAHLSVPGTAKPPQEKQNSIEISEVSAHSVLYTFKVCSLNPEKGRFLIEESLQTIRDRVEEMNPEFIGHIKLSLKLPDFMVKGSVTSSEETPQVEFIPRKNEKFELRLLSAITKVPKDRLRNIVESTLEAKLKESDISFEKKELHHGTLTKIDGLMKKKVSY

SEQ ID NO: 7813 - DNA, 1470 bp, Methanosarcina acetivorans C2A
  CDS (1)..(1470): transl_table=11
atggacgtaattgttgttggtggtttcctgggaagcgggaagaccacaactgtcattaatatgggtaaatacctggcagaaaaaggaaaaaaaattgccatcattgtgaatgagataggagaaatagggattgatggggatataattaagaaattcggatttgataccaaagagatcacaagcggatgtatatgctgtaccctgaaaatggggttgagaacaacagtcgatactctcatgaaagagtataagcccgatatcctgatgatcgaacctacaggtattgcttttccaaactccattaaaaacgaattcaagctaatgaacctaggtgaagaagttaaagttgctcccctggtaactctgatcgacggcagccgcttcaaacacctgatgaaagaaataaaggatttcgccatgaggcaaatcatagacgctgagattctgggcataaacaaggtggatcttatagactcacttcagatccccattcttgaagtttcagtccagcaacttaacccaacagccaaggtagtcttactttcaggaaaagacaccggagaaaagtttgaaaacttcatacaactggttcttccaggagtaaaggatattccaaataaaaccaaaaagacagaggaagagaccgaacccacacaacaggattttgaaaactcaaacgacacctgtggagttgatggttctgaagagaactcctcaaatgttccatataatcatggcgattctttcaagcataccgttggcagttattctgtagagtattccttaaaaggcggcagagaccttagcgaggaaactgcaagaatcattacaactgaaataatgaataaaataaaagaaaaggcccttaaacttaatccggaatttttggggcatattaagctcttcctcgataacggatcagaaacagtgaaacagagcattacaatatataacgaagagccgcaagaagatcttttcaaatcgaatgatggagctaccccgacatttaaagttctttctgcggtttcaaaagtcgaaaaagaagttcttaaaaatgcagtaagcagttcagtgcaagaaacatttgaaaaaatgggaatagagattcagcagatcaaacacagccatgatcatgaacatcaccatggacacgatcatcaccaaggacacgatcatcaccaaggacatgatgaggaagatgaagactgtcatcatggacagaaacatcaccgtgagcagcatcaccacgccgatgaggaagaatatcatgaagaagaaaatgaccacgaagaacacgagcactacgggaatgatcatcaccataaacacgaccatataaggaagcatggttatggagaacaagaacatgagcatgatgtagttcatgattgttgctgccacgaatgtgatcaccataagcattatgtacacgaaaattatgagcctcaaaagcctcataaattaaaataa

SEQ ID NO: 7814 - protein, 489 aa, Methanosarcina acetivorans C2A
MDVIVVGGFLGSGKTTTVINMGKYLAEKGKKIAIIVNEIGEIGIDGDIIKKFGFDTKEITSGCICCTLKMGLRTTVDTLMKEYKPDILMIEPTGIAFPNSIKNEFKLMNLGEEVKVAPLVTLIDGSRFKHLMKEIKDFAMRQIIDAEILGINKVDLIDSLQIPILEVSVQQLNPTAKVVLLSGKDTGEKFENFIQLVLPGVKDIPNKTKKTEEETEPTQQDFENSNDTCGVDGSEENSSNVPYNHGDSFKHTVGSYSVEYSLKGGRDLSEETARIITTEIMNKIKEKALKLNPEFLGHIKLFLDNGSETVKQSITIYNEEPQEDLFKSNDGATPTFKVLSAVSKVEKEVLKNAVSSSVQETFEKMGIEIQQIKHSHDHEHHHGHDHHQGHDHHQGHDEEDEDCHHGQKHHREQHHHADEEEYHEEENDHEEHEHYGNDHHHKHDHIRKHGYGEQEHEHDVVHDCCCHECDHHKHYVHENYEPQKPHKLK

SEQ ID NO: 7815 - DNA, 1356 bp, Methanosarcina acetivorans C2A
  CDS (1)..(1356): transl_table=11
atggatatcaccttttttcatctgcaagcacttttttataaggagggatatagagatagaaaaatatactttgagaatagaaaagttgacacttatatttctgaattaaaagcaggattttacactacatattatgaacatcaaaaaaatgacgatagtaataaagtagcagaaaacggaggaaagaaagtggacgtcattgttgttggaggtttcctgggaagcgggaagacaaccaccattatcaatatgggtaagtacctggcagaaaaaggaaaaaaagttgccattattgtaaatgagataggcgaagtagggattgacggggacgtgatcaataggttcgggttcgataccaaggagattacaagcggatgcatctgctgtaccctgaaagtcgggctgaggacaacaatggaccttctgacaaaagaatacaagcccgatatcgtgatgatcgaacccacaggaattgcgttcccgaacgttatcaggactgaagtcgaacttatgaatcttggagaagaggtaaaagttgccccccttgtgaccctgatcgacggcagccgcttcaagaatctgatgaaagaggtaaaagaatttgccatgaggcagattattgatgccgaaattctggggataaacaaggtggacctgatagaacctatccggatcccgatcattgaggcttcggtgcagcagctgaaccccaaagccaaggtggttttgctttcaggaaaggatacgggagaaaggtttgagaatttcatgcagcttgttcttcctgagatcaaagaaaatcaggaaaaaactcaggtaaccacccagaaagaaaaacccgtaccttctgaagttcaggaaaccgaggattccatcaaagcttccggggttggcagctatgctgcagagtttgaaattaaggatggaggcagcctgagcacggaagccgccaggaaccttactgcggaattaatgaacacaataaaagaaaaagttctgaagctgaaccccgaatttgtaggacatatcaaactcttcctggacaacgggctggaaaccgtaaaacagagtgttactatctattacgaagaaccccaggaagagataattaaatcaaaagaaggtgctaccccgacattcaaaatcctctccgctgtttcaaacgttgagaaggaagctctgaaagattctgtgaacagttcggtacacgaaacctttgagaaaaagggaatggatgtacataaagtcgaaaatggacatggtcacggacatgagcatcacggacatgagcatcacgaacatgaacagcatgaacatgtacagagaatcacgggaattaaaagcagaaaagagtaa

SEQ ID NO: 7816 - protein, 451 aa, Methanosarcina acetivorans C2A
MDITFFHLQALFYKEGYRDRKIYFENRKVDTYISELKAGFYTTYYEHQKNDDSNKVAENGGKKVDVIVVGGFLGSGKTTTIINMGKYLAEKGKKVAIIVNEIGEVGIDGDVINRFGFDTKEITSGCICCTLKVGLRTTMDLLTKEYKPDIVMIEPTGIAFPNVIRTEVELMNLGEEVKVAPLVTLIDGSRFKNLMKEVKEFAMRQIIDAEILGINKVDLIEPIRIPIIEASVQQLNPKAKVVLLSGKDTGERFENFMQLVLPEIKENQEKTQVTTQKEKPVPSEVQETEDSIKASGVGSYAAEFEIKDGGSLSTEAARNLTAELMNTIKEKVLKLNPEFVGHIKLFLDNGLETVKQSVTIYYEEPQEEIIKSKEGATPTFKILSAVSNVEKEALKDSVNSSVHETFEKKGMDVHKVENGHGHGHEHHGHEHHEHEQHEHVQRITGIKSRKE

SEQ ID NO: 7817 - DNA, 1089 bp, Streptomyces coelicolor A3(2)
  CDS (1)..(1089): transl_table=11
gtggggcagcgctcgactccgcagcagatcccggtcgtcgtgctcgccggattcctcggctccgggaagaccaccctgctcaaccacctcctgcaccgcagcggaggcagccggatcggcgccgtcgtcaacgacttcggatcgatcgagatcgacgcgatggccgtcgcgggtgccctcggcgactccaccgtgtcgctgggcaacggatgcctgtgctgtgccgtcgacgcgagtgaactggacgggtacctggcgcggctcgcccggcccgaggccggcatcgacgtcatcgtcatcgaggccagcggcctcgccgaaccgcaggaactggtgcgcatgctgctcgccagcgagcaaccggggatcgtctacggcggactcgtcgaggtcgtcgacgccgccgagttcgacgacacccgcgccaggcaccccgagatcgaccggcacctggccctcgccgacctggtcgtggtcaacaagaccgaccgggccaccgacgccgagcgtgtgctcggcctggtgcactcgctcgtgggcggcgccgccgtcgtcccggcgacctacggccgtatcgaccccgagttcctctacgactgccggcccggcgaggagcgcgtggggcagctgtccttcgacgacctgcacgaccactccgagggcggcgcacacgccgatcacctgcacgccgcctacgacaccctgtcgttcgtctccggcctcccgctcgacccgcgccggctcatgcgcttcctcgacagccgtcccaagggcttgtaccggatcaaggggtacgtcgacttcggcccgtacgacacgcggaaccggtacgccgtccacgccgtcggacgcttcctgcgcttctacccggagccctggaccccggccggtgccgccggcgggtccggagccccggagaccggccgtacccagctcgtcctcatcggctccggcatcgacgcggcggcccttggcgaggaactcgacgcgtgccgccgggacgccgacgccccacccgccgacgaacacggcatgtggggcgtcctgcgttacgtggccgacggcgaggagccgccggacagcccctag

SEQ ID NO: 7818 - protein, 362 aa, Streptomyces coelicolor A3(2)
MGQRSTPQQIPVVVLAGFLGSGKTTLLNHLLHRSGGSRIGAVVNDFGSIEIDAMAVAGALGDSTVSLGNGCLCCAVDASELDGYLARLARPEAGIDVIVIEASGLAEPQELVRMLLASEQPGIVYGGLVEVVDAAEFDDTRARHPEIDRHLALADLVVVNKTDRATDAERVLGLVHSLVGGAAVVPATYGRIDPEFLYDCRPGEERVGQLSFDDLHDHSEGGAHADHLHAAYDTLSFVSGLPLDPRRLMRFLDSRPKGLYRIKGYVDFGPYDTRNRYAVHAVGRFLRFYPEPWTPAGAAGGSGAPETGRTQLVLIGSGIDAAALGEELDACRRDADAPPADEHGMWGVLRYVADGEEPPDSP

SEQ ID NO: 7819 - DNA, 1158 bp, Methanosarcina mazei Go1
  CDS (1)..(1158): transl_table=11
gtggaagtcattgttgttggaggtttcctgggaagcggaaagaccactaccattatcaatatgggcaaatacctcgcagataaagggaaaaaagttgcaattatcgtaaacgagataggggaaatagggattgacggcgatgtgattaagagattcggtttcgacaccaaggaaatcacaagcgggtgcatctgctgtacattgaaagtcgggctgagggcaacaatgagcactcttgtaaaagagtataagcccgatatcataatgatcgagcccacaggaatcgctttcccgaatgtgatcaaaaccgaagttgagcttatgaatcttggagaggaagtgaaagttgctccacttgtaactctgattgacggcagccgcttcaaacacctgatgaaagaggtaaaagaattcgctatgaggcagattatagatgctgaaatcctgggaataaataaggtagatctcatagagccgatcaggataccgatactcgaaacttcggtccagcagttgaaccctgaagcaaaggtggtcttgctttcgggaaaggacaccggcgaaagatttgagaaattcatgcaggtagttcttcctgatataagagaagcaccgaaaaaaatccaggaaacagctactgcagaaaatacatccagcattacagggccgcaggaaaccgaagactccatcaaagcctcgggcgttggcagctatgcggcagagtttgaaattaaagaaggaggaaacctgaacacagaagaagccaggaaactcaccaccgaattaatgaatataataaaaggaaaagttctggagcttaaccctgaatttgtagggcatataaaactcttcctggacaatgggacggagaccgtaaaacagagtgtcaccatctataatgaagagcctcaggaagatgtgattaaatcaaaagatggagctttcccgacattcaagatactctctgcggtttcaaatgttgacaaagaagctctgaaagatgctgtaaacagctctgtgaaagaaacatttgagaaaaaagggataaatgcgcacaaaaccgagcatggacataagcacgaaggacacgcgcataatgaacacaaacatgagggacatatacagagaatcgggagcataaaaggtataaaagaataa

SEQ ID NO: 7820 - protein, 385 aa, Methanosarcina mazei Go1
MEVIVVGGFLGSGKTTTIINMGKYLADKGKKVAIIVNEIGEIGIDGDVIKRFGFDTKEITSGCICCTLKVGLRATMSTLVKEYKPDIIMIEPTGIAFPNVIKTEVELMNLGEEVKVAPLVTLIDGSRFKHLMKEVKEFAMRQIIDAEILGINKVDLIEPIRIPILETSVQQLNPEAKVVLLSGKDTGERFEKFMQVVLPDIREAPKKIQETATAENTSSITGPQETEDSIKASGVGSYAAEFEIKEGGNLNTEEARKLTTELMNIIKGKVLELNPEFVGHIKLFLDNGTETVKQSVTIYNEEPQEDVIKSKDGAFPTFKILSAVSNVDKEALKDAVNSSVKETFEKKGINAHKTEHGHKHEGHAHNEHKHEGHIQRIGSIKGIKE

SEQ ID NO: 7821 - DNA, 1326 bp, Xanthomonas axonopodis pv. citri str. 306
  CDS (1)..(1326): transl_table=11
atgtctctgtccccccagcgcgatgcgcgccttcccgtcaccgtgttgtccggctttctgggtgcgggcaagaccaccttgctcaatcgcatcctgcacaaccgcgacggcttgcgggtggcggtcatcgtcaacgacatgagcgaggtcaacatcgacgcgcagctggttcgcgagggcggcgcggcgttgcggcgcaccgaagaaacgctggtggaattcagtaacggctgcatctgctgcacgctgcgcgacgatttgctgcaggaagtgcggcggctggccgagcagggccgctacgactatctgctgatcgaatcgaccggtattgccgagccgatgccggtggcggccaccttcgcggtgcgcgatgccgatggtttcagcctatcggacatcgctcggctcgacaccatggtgacggtggtggacggcagccgtttcctggaggatttcggctcggctgccacgctggccgacctgggccagcaagccggcccggacgacacgcgcgggctggtgcagttgctgggcgaacaggtggagttcgccgatgtgctggtgatcagcaagtgcgaccgcatcgacgcgcagcagctgcaacgccttcgcgccgtgctgcgtgcgctcaaccgcgacgcggcaattgtggatgccgcgcacggggaagtgccgctgcagcagctgctggacaccgggcgtttcgatttcacccgtgcgcagctggcgccgggctggatgcaggaactgcgcggccagcacacccccgagaccgaggaatacggcatcagcagcttcgtgtaccgcgcgcgccggccattccatccacagcgcttcgcacgcatggtgcacagcggcttgccgcaggtgatccgcagcaagggcttcttctggctggccagccgcatggattgggtgggcgaactgtccagcgtgggcggcgccacccagaccagcgcggccgggttctggttcgctgcgcgccaccgtgtcgatgcgcaggcagtcggccagccgctgcagaccagcatcacgccgctgccctacaccgatatcggctggcagcggcaacagacgcagtgctggaccgcgccactgccgcaaccgcacgaggtcggcgatgccagcgaatacgctgcgatgcagcgactgtggcatccgctctggggcgatcgccgccaggagctggcggtgatcggcgtggacatggatgcaccgcgcacacgggccgtgctggacgcgtgcctgctcagcgatcaggaactacggcaagggccggcgcaatggcaactgctggacgacccgttcccccactgggcgcggtaa

SEQ ID NO: 7822 - protein, 441 aa, Xanthomonas axonopodis pv. citri str. 306
MSLSPQRDARLPVTVLSGFLGAGKTTLLNRILHNRDGLRVAVIVNDMSEVNIDAQLVREGGAALRRTEETLVEFSNGCICCTLRDDLLQEVRRLAEQGRYDYLLIESTGIAEPMPVAATFAVRDADGFSLSDIARLDTMVTVVDGSRFLEDFGSAATLADLGQQAGPDDTRGLVQLLGEQVEFADVLVISKCDRIDAQQLQRLRAVLRALNRDAAIVDAAHGEVPLQQLLDTGRFDFTRAQLAPGWMQELRGQHTPETEEYGISSFVYRARRPFHPQRFARMVHSGLPQVIRSKGFFWLASRMDWVGELSSVGGATQTSAAGFWFAARHRVDAQAVGQPLQTSITPLPYTDIGWQRQQTQCWTAPLPQPHEVGDASEYAAMQRLWHPLWGDRRQELAVIGVDMDAPRTRAVLDACLLSDQELRQGPAQWQLLDDPFPHWAR

SEQ ID NO: 7823 - DNA, 1182 bp, Mus musculus
  CDS (1)..(1182)
atgttacctgctgtgaaaactgtggaggcggaagaagagtacgcggaggattgtcctgaattggtccccattgagaccaagaaccaagaagaggaaaatcttgacttcatcactaagattccagtcacaattgtcaccgggtacttaggtgctggaaagacaacacttctgaactacattttgacagaacaacataatagaaaaatagcagtgattttaaatgaatttggagaagggagtgcagtagagaaatccttagctgtcagtcaaggtggagaactctatgaagaatggctggaacttagaaatggttgcctctgctgttcagtcaaggacagtggccttagagctatagagaatctgatgcaaaagaagggcaagtttgactacatactcttagagaccactgggctagcagatcctggtgcagtggcttctatgttttgggttgatgctgagttagggagtgatatttatcttgatggtatcataactgttgtagattcaaaatatggattaaaacatttaactgaagaaaaacctgatggccttgtcaatgaagctactaggcaagttgcattggcagacatgattctcatcaataaaacagacttggtttcagaagaggagctaaacaacttaagaacaactatcagatcaataaatggactgggaaaagttttagaaactcagagatcaagagttcatctctcaaatatattagaccttcatgcctatgatattctctctggaataagtttacagaaaaagctccagcatgtgtcaacagcaccccaccttgatcagagtattgttacagtcacatttgaagtaccaggaagtgcaaaggaagagtgtctaaatgtatttatccagaatctcctgtgggaaaagaacgtgaaaaacaaggacggccactgcatggaggtcattcggctaaagggactggtgtctatcaaagacaaaccacagcaaatgattgtgcaaggcatccatgagctgtacgacctggaagaaagcctagtgaactggaaggatgatgcggagcgagcgtgtcagctggtcttcattggtagaaatttagataaggatgttcttcaacaactcttcctcactgctgtggcagaggcagaagagcaaaggacagcaccaggcagagatggagtttgtccatcgcactag

SEQ ID NO: 7824 - protein, 393 aa, Mus musculus
MLPAVKTVEAEEEYAEDCPELVPIETKNQEEENLDFITKIPVTIVTGYLGAGKTTLLNYILTEQHNRKIAVILNEFGEGSAVEKSLAVSQGGELYEEWLELRNGCLCCSVKDSGLRAIENLMQKKGKFDYILLETTGLADPGAVASMFWVDAELGSDIYLDGIITVVDSKYGLKHLTEEKPDGLVNEATRQVALADMILINKTDLVSEEELNNLRTTIRSINGLGKVLETQRSRVHLSNILDLHAYDILSGISLQKKLQHVSTAPHLDQSIVTVTFEVPGSAKEECLNVFIQNLLWEKNVKNKDGHCMEVIRLKGLVSIKDKPQQMIVQGIHELYDLEESLVNWKDDAERACQLVFIGRNLDKDVLQQLFLTAVAEAEEQRTAPGRDGVCPSH

SEQ ID NO: 7825 - DNA, 984 bp, Yersinia pestis KIM
  CDS (1)..(984): transl_table=11
atgacaaagaccaatttaattaccggatttttaggttgtggcaaaaccacaactatccggcacttactcgcacagaagccggaacatgaaaaatgggcggtgctggtcaatgaatttggtgagattggtattgatggcgctctgttggcggatagcggtgctgttttaaaagagatcccagggggctgtatgtgctgtgttaatgggctaccgatgcaaattggcctgaacatgctgttgcagcaggcaaaaccagatcgcctgctcattgagccaaccgggctgggccacccgaaacaaattctgtcattattaacgtctgatatttatcagccttggattgacttacgcgccacactttgtctgctggatgcccgccaactgagtgaaccccgttataccgaaaatgaaaatttccgtgaccaactggcggcggcagatatcattgtggtcaacaagcaagacacttaccgctcggccgataacgcggtgttacaacaatggcaacaaaagcagccattatcgcggccgctgtatcatagcgaatatggcaaactcgacgtggccctgctcgaccaaccacacagtaataaagacgaacttccttctggtacacatcatcacggcacatcacagccaaaaggattagccgcattacgtctgaaaggggccgaaccctggcgtcgggcattaaatcgggggcaagggtatctgagctgtggctgggtatttgatgccaacaccgtttttgataccgtgccattattggagtgggtacgattgaacccagcagaacgggtaaaaggtgtcatgcgcatcccggaaggaaccttgatggttaatcgacaaggtaatgacttacaaatagacactcgccaaatacccccgctggatagccgcattgaattgattagcgccactgatattgattggaacgtattgcaacatgatttattaaaaattcgtttacgtaacggggtatga

SEQ ID NO: 7826 - protein, 327 aa, Yersinia pestis KIM
MTKTNLITGFLGCGKTTTIRHLLAQKPEHEKWAVLVNEFGEIGIDGALLADSGAVLKEIPGGCMCCVNGLPMQIGLNMLLQQAKPDRLLIEPTGLGHPKQILSLLTSDIYQPWIDLRATLCLLDARQLSEPRYTENENFRDQLAAADIIVVNKQDTYRSADNAVLQQWQQKQPLSRPLYHSEYGKLDVALLDQPHSNKDELPSGTHHHGTSQPKGLAALRLKGAEPWRRALNRGQGYLSCGWVFDANTVFDTVPLLEWVRLNPAERVKGVMRIPEGTLMVNRQGNDLQIDTRQIPPLDSRIELISATDIDWNVLQHDLLKIRLRNGV

SEQ ID NO: 7827 - DNA, 1017 bp, Thermosynechococcus elongatus BP-1
  CDS (1)..(1017): transl_table=11
atgagtgcaaaaattccagtgacgattattaccggctttctcggcagtggtaagacgactctgattcggcagttacttcagaatgcagcgggcaggcgcattgccgtgattgtgaatgagtttggcgatgtcggtattgatggcgagctgctacaggcctgttgcgatcgcacagtgggcatctgggaactcaccaatggctgtctatgttgtacggtgcaggatgaattcttgccaacgatgcagaccctcttggcgcggcggcaggagattgatcatattgtcattgaaacatcgggactggcattgcccaagcccttagtcatggccttccggtggccggaggtgcgccataccgccaccgttgatggcgtggtgaccgttgtggacggtgtggccttggccgcgggtcaagtgagtgcagatttagaagcgctctttgcccagaaagaggcggatgccaatttacagcatgaggatacgccccttgaggaactctttaacgatcaactggcctgtgccgacttggttatcctcaacaaggcagatcaactgacccccgatcaggtacagcaatgcctgagggaactccgccagcaactgccgacccggattaaggtcctagcggctcagcaaggacaggtgcccgcagatcttttgctgggatttaatgcagccgtggaggagaacttgggacagcgacctagccaccatgactttgaggaggaacatgatcacgacgaagagattcaggcagtttgtttagagttgggggtttgggatctgcaacgcctacgtcaatcccttgagcgattgctgcacgtaccggacatttatcgcattaagggttttgcagccattgaggacaagccgctgcgtctggtggtacagggggtcggtcagcggttagactcattttacgatcgcccgtggcaagcggcggagacccgtcaaactcgcctcgtggttattggtcgtcggctggatcaacgggagttgctatcccattttggctag

SEQ ID NO: 7828 - protein, 338 aa, Thermosynechococcus elongatus BP-1
MSAKIPVTIITGFLGSGKTTLIRQLLQNAAGRRIAVIVNEFGDVGIDGELLQACCDRTVGIWELTNGCLCCTVQDEFLPTMQTLLARRQEIDHIVIETSGLALPKPLVMAFRWPEVRHTATVDGVVTVVDGVALAAGQVSADLEALFAQKEADANLQHEDTPLEELFNDQLACADLVILNKADQLTPDQVQQCLRELRQQLPTRIKVLAAQQGQVPADLLLGFNAAVEENLGQRPSHHDFEEEHDHDEEIQAVCLELGVWDLQRLRQSLERLLHVPDIYRIKGFAAIEDKPLRLVVQGVGQRLDSFYDRPWQAAETRQTRLVVIGRRLDQRELLSHFG

SEQ ID NO: 7829 - DNA, 1059 bp, Thermosynechococcus elongatus BP-1
  CDS (1)..(1059): transl_table=11
atgacaacaaccctctctcattcctctccaaaaatgcaggctgaaaaacacggtctgcctgtcaccatcatcacgggttttctggggagtggcaaaacaaccctcctaaaccatattctcacgaaccaagaaggcctcaaaaccgctgtactggtcaatgaatttggcgagattggcattgataaccagctattggtgtcccaagatgagggcatggtggagctcagcaacggctgtatctgctgcactatcaacaacgacttgatcaatgccgtctatcgggtgcttgagcggcccgataaggtggactatttggtggtggaaacaacgggattggcggatccgttgccggtggcgctaacatttctggggaccgatctacgggatctcacccgcttggactcgattattaccgtggtggatgcggagaactttagtctggatcttttcaatagcagcgctgcccaaagccaaattgcctacggtgacattattctcctcaacaaagccgacctagtcaccgaggaacgcttgcaggagctagaacggcgcattcacgagatgcgggagggggcacggatcattcgcacggtgaaggcacaggtaccgctgcccttgattttgagtgtgggattgtttcagagcgatcgctactttgatccggaacacgaacactctgagcacgaccacgatcatgagcacgatcatgggtgtgatgaccattgcgattctgatcatcatcaccaccatcatcactctaatcaccttgaggaggatggctttacctccgtgtctttccagagcgatcgcccctttgaactgcgaaaattccagtattttcttgaccaccaactaccccaatccgtctttcgcgccaagggcatcctttggtttaaggaaagtccccgccgccacgtctttcacctcagtggtaagcgctttagtctcgatgatgaggaatggaagggcgatcgcaaaaatcaactggttctcattggccagaacttagatcatgcaaccctactgaaccagttggccgcctgtgtcactgatccataa

SEQ ID NO: 7830 - protein, 352 aa, Thermosynechococcus elongatus BP-1
MTTTLSHSSPKMQAEKHGLPVTIITGFLGSGKTTLLNHILTNQEGLKTAVLVNEFGEIGIDNQLLVSQDEGMVELSNGCICCTINNDLINAVYRVLERPDKVDYLVVETTGLADPLPVALTFLGTDLRDLTRLDSIITVVDAENFSLDLFNSSAAQSQIAYGDIILLNKADLVTEERLQELERRIHEMREGARIIRTVKAQVPLPLILSVGLFQSDRYFDPEHEHSEHDHDHEHDHGCDDHCDSDHHHHHHHSNHLEEDGFTSVSFQSDRPFELRKFQYFLDHQLPQSVFRAKGILWFKESPRRHVFHLSGKRFSLDDEEWKGDRKNQLVLIGQNLDHATLLNQLAACVTDP

SEQ ID NO: 7831 - DNA, 1176 bp, Oceanobacillus iheyensis HTE831
  CDS (1)..(1176): transl_table=11
ttgtctaagagagtaccagtcacggtgttgagcggatatttaggcgctgggaaaacaacactgctgaattatatattaaataataaacaatacctaaaaatagctgtcatcgtaaatgatatgagtgaagtaaatatcgatgcaagtatggtgaagatgggcggattcagtagaacggaagaaaagctagtagcgttacagaatggttgtatctgctgtacgttaagagaagatttgatacaggaagtagataatcttgctaaactggatatcgattatatcgttatagaatcttctggtatttcagaaccaattccagttgcacaaagttttatttatgaggacgaagaattgaaaattaaccttagtgatcattgttgcttggttacgatggcaacggtcgtggacgcaaatcgcttttgggatgattatggctctggagacagtttgctagatcgtaaccaagaagtaaatgaaaatgatgaaagagaagtaattgatttactcatcgatcaaatcgaatttgcaaatgtaatcatagtaaataaagtagatttaattgatacgatacacatggaagaattaatggcagtacttcaccagttaaatcctgaggcacaaataattcaatcggagtacggtgtcgtaccattggaatctatacttcatacgaggttgtttgattttgaaaaagctagccaaggggctggttggataaaagagttaaatgaggaacatattccagaaacagaggaatatgggataagttcgtttgtgtatcgccgtaatagacctttccatccacaaagatggaatgaatggttgaataattggccgaatacgattattcgagcaaagggatttttctggttagcttcaaggaataatgttaccggattactctcacaagctggctcttcactctctattcaaggagcgggaaattgggttgccacatatccaaaagaagagcaaaagtcattaattaaggaagatcctaaccttttagagtactgggatagtaagcacggggacagaatgaatgacctagtttttattgggataaagatggataaacaagcaattatgaaagagctagattcatgcttattaaccgattcggaaatggaatccgattggaataaattgatcgatccattgccggcttttagttag

SEQ ID NO: 7832 - protein, 391 aa, Oceanobacillus iheyensis HTE831
MSKRVPVTVLSGYLGAGKTTLLNYILNNKQYLKIAVIVNDMSEVNIDASMVKMGGFSRTEEKLVALQNGCICCTLREDLIQEVDNLAKLDIDYIVIESSGISEPIPVAQSFIYEDEELKINLSDHCCLVTMATVVDANRFWDDYGSGDSLLDRNQEVNENDEREVIDLLIDQIEFANVIIVNKVDLIDTIHMEELMAVLHQLNPEAQIIQSEYGVVPLESILHTRLFDFEKASQGAGWIKELNEEHIPETEEYGISSFVYRRNRPFHPQRWNEWLNNWPNTIIRAKGFFWLASRNNVTGLLSQAGSSLSIQGAGNWVATYPKEEQKSLIKEDPNLLEYWDSKHGDRMNDLVFIGIKMDKQAIMKELDSCLLTDSEMESDWNKLIDPLPAFS

SEQ ID NO: 7833 - DNA, 972 bp, Oceanobacillus iheyensis HTE831
  CDS (1)..(972): transl_table=11
atggagaacgatgcaaggacgccagttactatagtgacgggatatttaggtgcaggtaaaacaagttttttaaaccacattcttcaccaaacaagtgaaaaattggctataatcgtaaacgaatatggtgatataggtattgatgatcagttaatagaaaagacaaaagaagagattattgaaatcaataaaggttgtatatgctgtaatgtacgcaaagatttaatagacacattatcgatgcttttatttacaagagaacaaggaatgattgaattcgatagagtacttatagaaacaactggcttagcagatccggcaccgattgtccagacattcctaatggatcccaaaatgattgaatcgtacgacatagatagtgtctgtacgattgtggatagtaagcatatttccatgcatttagatcagaaagatgaatcacttagccaaatagcattttcagataatatcttgttaaataagattgatctaatttctagtgaacagttagaaaagctgaaagagagaataacaaagataaatccgttcgctaatatatatgaaacaacaaaaagtaatattgatataaataaagtgttcaatctctattcatttgatttaaaggataaattacgaataagtccaacgtttttacatgatacccatcaccatcatgataacgtgacttctttatcgttaatagaaacaaaacctctagatttggaaaaactaaatctgtggttctcttatctagttcaaatacttggagaaagtttataccgttacaaaggtattttatatatcaatggaaaaaggagaaaatatatttttcaaggtgttcatatgttgtttgcagcagaagaacaagccgaatggggagatatgtcaccaagaagcgagatcgtatttatcgggaaagacttaaacaagcaaaaattgaaggagcaatttcataaatgtatttcaaggtaa

SEQ ID NO: 7834 - protein, 323 aa, Oceanobacillus iheyensis HTE831
MENDARTPVTIVTGYLGAGKTSFLNHILHQTSEKLAIIVNEYGDIGIDDQLIEKTKEEIIEINKGCICCNVRKDLIDTLSMLLFTREQGMIEFDRVLIETTGLADPAPIVQTFLMDPKMIESYDIDSVCTIVDSKHISMHLDQKDESLSQIAFSDNILLNKIDLISSEQLEKLKERITKINPFANIYETTKSNIDINKVFNLYSFDLKDKLRISPTFLHDTHHHHDNVTSLSLIETKPLDLEKLNLWFSYLVQILGESLYRYKGILYINGKRRKYIFQGVHMLFAAEEQAEWGDMSPRSEIVFIGKDLNKQKLKEQFHKCISR

SEQ ID NO: 7835 - DNA, 1050 bp, Brucella suis 1330
  CDS (1)..(1050): transl_table=11
atgcagggacagaaaattccggcaacggtcatcacgggttttctcggatcgggcaagacaaccatgatccgcaacttgctggaaaatgccaatggcaagcgcatcgcactgattatcaacgagttcggcgatctcggcgtcgatggcggcattctgaaaggctgcgggatcgaaacctgccgggaggaagatgtcatcgagctcaataatggctgcatctgctgcaccgtggccgatgatttcattccgaccatgacaaagcttctggaccgggaagaccggcccgaccatatcgtgatcgaaacctccggtcttgccttgccgcagccgctggtggccgccttcaactggccggagatcaagacgcaggtgacggttgatggcgtggtgacggtgatcgatgccgccgccgtggcggaaggccgttttgccgacgaccatgacaaggtggatgcgcagcgcgcagccgatgaatctcttgaccatgaaagccccttggaggaactttttgaggatcagattcatgccgccgacctcattgttctcaacaaggccgacctgatcgatgctgcgaaactggatagcgtgaaggcggatgtggcggagcgttcgtcacgccgggtgaatatggtgcctgcaagcttcggcaagcttggtgcggatgttctgctggggcttggcgttgggacggaagacgatatcgtcaaccgtcgctcgcatcatgaagcccatcatggagacggccacgagcatgatcatgacgagtttgagagttttgtggtggaggccggttcggttgccgatccgaaggcttttgcggaaaagctgaaggctgtgattgccgaacacgatattcttcgcctgaagggttttgtggatgtgccgggcaagccgatgcgccttgtggtgcaggcggtggggccgcgtatcgaacattatttcgaccggccatggggcaaggatgaaacacgctcgacccggctggtggtgattggcctgcacgatattgacgaagcagccatcgcccaggccgtgaaagatgccgcctga

SEQ ID NO: 7836 - protein, 349 aa, Brucella suis 1330
MQGQKIPATVITGFLGSGKTTMIRNLLENANGKRIALIINEFGDLGVDGGILKGCGIETCREEDVIELNNGCICCTVADDFIPTMTKLLDREDRPDHIVIETSGLALPQPLVAAFNWPEIKTQVTVDGVVTVIDAAAVAEGRFADDHDKVDAQRAADESLDHESPLEELFEDQIHAADLIVLNKADLIDAAKLDSVKADVAERSSRRVNMVPASFGKLGADVLLGLGVGTEDDIVNRRSHHEAHHGDGHEHDHDEFESFVVEAGSVADPKAFAEKLKAVIAEHDILRLKGFVDVPGKPMRLVVQAVGPRIEHYFDRPWGKDETRSTRLVVIGLHDIDEAAIAQAVKDAA

SEQ ID NO: 7837 - DNA, 1173 bp, Brucella suis 1330
  CDS (1)..(1173): transl_table=11
atgcctgatcccattcccgtttccgtgctgaccggctttcttggctccggcaagacgacgctgctcaaccggcttttgaaagatccggcgctcagcgatacagcagtcattatcaacgagttcggcgaggtgagcattgaccatctgctggtcgagcaggcgagcgagggcgtgatcgagctggctgacgggtgtctgtgctgcacagtgcgcggtgaactggtcgatacgctggccgatctcatcgaccggttgcagaccggccgcatcaaggcgctgaagcgcgtcatcatcgaaaccacggggcttgccgatccggccccggtgctgcattcgatcatgggtcatcctcttctcacgcaggttttccggcttgatggcgtgctggctaccgtggatgcggtgaacggcatggcaacgctcgacaatcatgaggaagccgtcaaacaggcagccatggccgaccgcatcatcctcaccaagaccgatctgccggaagcacaggctggcttgccggcattgaaggcacggttgcgcacgcttaaccccggagccgatattctggaagcgggggaagagcgcacaggctatgccgcgctttttgaatgcgggctttataacccgcagacgaaatcgacggatgtgcggcgctggcttaaggccgaagcctatgaggacgagcatcatggccatggccatgtgtgcgggccggattgcggtcacgaccatcatcaccacgatcaccatcacgatcatcataacgatcagggctatgcgcatcatcatcatcatgacgatgcgatccgttcgttttcactgcgccatgatgcgccgatcccggtttcgaccttcgagatgtttctcgatcttctgcgttcgacccatggtgaaaagctcttgcgcatgaagggtatcgtgcagattgccgaagacccggaccgcccggtcgtcatccatggtgtgcagaagattttccatccgcccgcgcgcctgccgcaatggccgcaaggcaagcgcgaaacgcttctggtcctgattgtgaaggacttgccggaggcctatgtgcgggaacttttcgatgcctttctgggccggcccggcctcgacaggcccgaccgcgcagccatgactgaaaatccgctggccattccggggttctcaccccgccggtaa

SEQ ID NO: 7838 - protein, 390 aa, Brucella suis 1330
MPDPIPVSVLTGFLGSGKTTLLNRLLKDPALSDTAVIINEFGEVSIDHLLVEQASEGVIELADGCLCCTVRGELVDTLADLIDRLQTGRIKALKRVIIETTGLADPAPVLHSIMGHPLLTQVFRLDGVLATVDAVNGMATLDNHEEAVKQAAMADRIILTKTDLPEAQAGLPALKARLRTLNPGADILEAGEERTGYAALFECGLYNPQTKSTDVRRWLKAEAYEDEHHGHGHVCGPDCGHDHHHHDHHHDHHNDQGYAHHHHHDDAIRSFSLRHDAPIPVSTFEMFLDLLRSTHGEKLLRMKGIVQIAEDPDRPVVIHGVQKIFHPPARLPQWPQGKRETLLVLIVKDLPEAYVRELFDAFLGRPGLDRPDRAAMTENPLAIPGFSPRR

SEQ ID NO: 7839 - DNA, 1125 bp, Brucella suis 1330
  CDS (1)..(1125): transl_table=11
atggccgaagccgaggcaacagcaaccactgaagctggccgcattcccgttaccgttctgaccggatatctgggctcggggaaaacgacccttctcaatcgcatcctgaccgaaaaccacggcaagcgctatgccgtcatcgtcaatgagttcggcgaaatcggcatcgataacgacctcatcgtcgaatcggacgaagaaatctacgagatgaacaatggctgcatctgctgcaccgtgcgcggcgacctgatccgcgtggtggaaggcctgatgcgccgccccggacgttttgacgccattgtggtggagacgacgggccttgccgatccggttccggttgcgcagacttttttcatggatgacgacgtgcgcgccaagaccgggcttgatgccgttgtcgcccttgtggatgccaagcacctgccgctgcgcctgaaggacagccgcgaggcggaagaccagatcgcatttgccgatgtcgtgctcatcaacaagaccgacctcgtgacgccggaagaactggcggcggtcgaagccaccgtgcgcgccatcaacccgcacgcaatcatccaccataccgagcgcgcatcgattccgctcaaccgcgtgctggaccgtggcgccttcgacctgaagcgcgttctggacaatgatccgcacttcctcgaccatgacgacccggaccatgtctgcggccccgattgcgaccacgatcatcatcaccatgggcatgaccatcaccatcatgatcatcacgatcacgaccatgtttgcgggccggactgcgaccacgatcacgatcacgatcatgcctcgcccatccacgacgttacggtgaagtccgtttcgctgcgaacaggtgaaattgatccggcgaaatttttcccatggatccagaacattacccagacgcaaggcccgaatatcctacgcctgaaaggcatcatcgccttcaaggacgatccggaccgctatgtcgtgcagggcgtgcacatgattatcgaaggcgatcaccagcgcgcgtggaagccggaagaaaagcatgaaagccgcctcgtcttcatcgggcgcgagcttgatccggcggcattgaaagccggttttgagaactgccgggcctga

SEQ ID NO: 7840 - protein, 374 aa, Brucella suis 1330
MAEAEATATTEAGRIPVTVLTGYLGSGKTTLLNRILTENHGKRYAVIVNEFGEIGIDNDLIVESDEEIYEMNNGCICCTVRGDLIRVVEGLMRRPGRFDAIVVETTGLADPVPVAQTFFMDDDVRAKTGLDAVVALVDAKHLPLRLKDSREAEDQIAFADVVLINKTDLVTPEELAAVEATVRAINPHAIIHHTERASIPLNRVLDRGAFDLKRVLDNDPHFLDHDDPDHVCGPDCDHDHHHHGHDHHHHDHHDHDHVCGPDCDHDHDHDHASPIHDVTVKSVSLRTGEIDPAKFFPWIQNITQTQGPNILRLKGIIAFKDDPDRYVVQGVHMIIEGDHQRAWKPEEKHESRLVFIGRELDPAALKAGFENCRA

SEQ ID NO: 7841 - DNA, 1203 bp, Brucella suis 1330
  CDS (1)..(1203): transl_table=11
atgcaaaagcggcttcccgttacggttttgtccggctttctcggggcaggcaagacgacactgctcaatcatgtgctcaacaatcgggaaaaccgccgtgtggcggtgatcgtcaacgatatgagcgagatcaatgttgacgctgcccttatccgcgagggcggggctgatctttcccgcaccgaggagcagcttgtcgaaatgaccaatggctgcatttgctgcacgctgcgcgatgatcttttgaaagaggtctcgcaactggccgctcagggacgcttcgattatctcctgatcgaatcgaccggaatttcggaacccttgccggtggcggccactttcgagtttcgcgatgagagaggcaaaagcctttccgatggcgcccggctggacacgatggttacagtggtggacgcagccaattttctcaaagactacgcttcaggtgattttctgcgtgatcgcggcgagtcgctcggtgaagaagacgagcgtacgcttgtcgatcttctggtcgagcagatcgagtttgccaatgtcgtggtgttgaacaagatatccatggtgtcgaaagaggaatgtgcgctggcgcgcaaggttatccgctcgctcaacccggacgcccgcatcgaggagacggattttgggcaggtgccgctcaatacgattctcgacacgcgcctgttcgatttcaacaaggcgcatgaacatccgctctggtacaaggagctttatggtttcaaccagcatgtgccggaaaccgaggaatatggtgtccgctcctttgtctatagggcgcgaaaacccttcgatccggcgcggtttcaagccttcatcgaccagaactggcccggtgtcgtgcgctcaaaaggctttttctggttggcgacccggcccgatttcgtgggtgagatcagccaggcaggtgctttggtgcgcacaagcaaacgaggacgctggtggtccgccgtgccgaagcactattggcctgccgaacccgaatggcagcgcgccatgcagccctattttcatgaggtctggggcgaccggcggcaggaaattgtttttatcggcatcgatccgatgcggcaggaagcgattatcgcagaacttgataaatgtctggtgcaggaggaatgcttcgcaccagagtgctggtcaggcttgagcgatccatttccgaactggtcggaagcggcatag

SEQ ID NO: 7842 - protein, 400 aa, Brucella suis 1330
MQKRLPVTVLSGFLGAGKTTLLNHVLNNRENRRVAVIVNDMSEINVDAALIREGGADLSRTEEQLVEMTNGCICCTLRDDLLKEVSQLAAQGRFDYLLIESTGISEPLPVAATFEFRDERGKSLSDGARLDTMVTVVDAANFLKDYASGDFLRDRGESLGEEDERTLVDLLVEQIEFANVVVLNKISMVSKEECALARKVIRSLNPDARIEETDFGQVPLNTILDTRLFDFNKAHEHPLWYKELYGFNQHVPETEEYGVRSFVYRARKPFDPARFQAFIDQNWPGVVRSKGFFWLATRPDFVGEISQAGALVRTSKRGRWWSAVPKHYWPAEPEWQRAMQPYFHEVWGDRRQEIVFIGIDPMRQEAIIAELDKCLVQEECFAPECWSGLSDPFPNWSEAA

SEQ ID NO: 7843 - DNA, 1728 bp, Plasmodium falciparum 3D7
  CDS (1)..(1728)
atgattgggattacaataatcaccggtttcttaggagcagggaaaactacactgctaaaaaatttattaaatgaaagtattgagaaagataaaaaaattgcaataattcataatgaatttacggaaaagaacaacaatattgacaaaatagtttttaaggatataaatgatatatataacattccaaaaattaaagaagatgataaaaataatgtaaataataatttaaaaaaagatatacaaaaaaataaaaatgaattaagaataataaacgaaatagatagtgaagaaggtttcatatatgaacttaataatggctgtttatgttgttcaaataaaagtaattttgttaaattgatagaaaatattttatcattaaaaactaagtatgattatatatttgtagaagtttcaggcgtttatgataatatacaaattaacaatttattatggttagatgaacttaataagtcaaaaatatatttagatagtattatacatatagtagattcatatcattttattaaatattataataaacaagaaataaaacaaaatactaaggacacattatctaatgaaattaatcatgaacatgaaaaaaaaaaaaaaaatgaagccaacaacgtatatcataatgaaaagaataatgaatccaacaacgtatatcataatgaaaaaaataatgaatccaacaacgtatatcataatgaaaaacaaaatgaagccaacaactttggtcctaatgaacaaactccagaatatgaacaaattatggtatcagatgttataatattaaataaaattgataaattaaatgaacacaatataaatgaactaaaaatttttattcataaactaaatcctattggcactatatacacaactagctattgttatgtacctatagaaaatataacaaacctaaaatgttatgaaaaaaaaaatataaaaaatattataattaataataccaaagtagaaaatgttgtttcttttcattataatgattttcataatatgacttttcattttgaccatgacatatcttcattaatacaattaagtgatcttttaaataaaatgaaaaataaatttataaaacaaaaggatacaaatatattaaaacaaattgtaacaatactgaagaataaaaatattttttcatataaaaaaattaatcatattttagctacccttttatggaatagcaaattacagatatatcgtggtaaaggtgtttttgttgcttttaatgatgatatttataacaataaacataaaatcaaattgaatatttattattatcaaagtgtgggagatttatacgaaattaatcatgtaatgactgatatacatacattttttcaaacatatgtaactaaaaatataaaggaaaacgaaataatacacaccaacaacaataataataataataataataataataatataaacattatttctaataatattaataatgaaaatacacagaccgaatttaacattcataatattaattatgaccatgaagagcacacatgtgatgatcttttagaattcgaaaattatatatctgatgattcttcgtgtagtgaaaataatgaatataacataaacaatattttgaataatatgcatatttttacttccagatttttatttatagggaaaaacataaacatggaagatataaaaaataagcttgatgattgtttgtacaaataa

SEQ ID NO: 7844 - protein, 575 aa, Plasmodium falciparum 3D7
MIGITIITGFLGAGKTTLLKNLLNESIEKDKKIAIIHNEFTEKNNNIDKIVFKDINDIYNIPKIKEDDKNNVNNNLKKDIQKNKNELRIINEIDSEEGFIYELNNGCLCCSNKSNFVKLIENILSLKTKYDYIFVEVSGVYDNIQINNLLWLDELNKSKIYLDSIIHIVDSYHFIKYYNKQEIKQNTKDTLSNEINHEHEKKKKNEANNVYHNEKNNESNNVYHNEKNNESNNVYHNEKQNEANNFGPNEQTPEYEQIMVSDVIILNKIDKLNEHNINELKIFIHKLNPIGTIYTTSYCYVPIENITNLKCYEKKNIKNIIINNTKVENVVSFHYNDFHNMTFHFDHDISSLIQLSDLLNKMKNKFIKQKDTNILKQIVTILKNKNIFSYKKINHILATLLWNSKLQIYRGKGVFVAFNDDIYNNKHKIKLNIYYYQSVGDLYEINHVMTDIHTFFQTYVTKNIKENEIIHTNNNNNNNNNNNNINIISNNINNENTQTEFNIHNINYDHEEHTCDDLLEFENYISDDSSCSENNEYNINNILNNMHIFTSRFLFIGKNINMEDIKNKLDDCLYK

SEQ ID NO: 7845 - DNA, 987 bp, Shigella flexneri 2a str. 301
  CDS (1)..(987): transl_table=11
gtgaccaggaccaacctcatcaccggttttctcggcagcgggaaaaccacgtcgattcttcatctgttagcccataaagatcccaacgaaaaatgggcggtactggttaatgaatttggggaagtcggaattgatggtgctttgctcgccgatagcggcgcattgctgaaagagatccccggcggctgcatgtgctgcgttaatggtttacccatgcaggtagggttgaataccttactgcgtcagggaaaaccagaccgcttgttgatagagccgaccgggctgggccatccgaaacagatcctcgatctgttaaccgcaccagtctatgaaccgtggatagatctgcgcgccaccttgtgcattctcgatccacgcctgctgctggacgaaaaaagcgccagcaatgaaaacttccgtgaccagctggctgccgcagacatcattgtcgccaataaatccgaccgtgcgacgcccgaaagtgagcaagcgctacagcgttggtggcagcaaaatggtggcgatcgacaattaattcacagtgagcatgggaaagttgacggtcatcttctggatttgccgcgtcgcaatttagccgagttgcccgccagcgccgcgcattctcatcagcatgtcgtgaaaaaagggttagcagcgttaagcctgccagagcatcaacgctggcgtcgcagtctgaacagcgggcaaggatatcaggcctgcggctggatattcgacgctgatacggtattcgacaccattggcattctggaatgggcgcgacttgcaccggtggaacgcgtcaaaggcgtgctgcgtattcccgaagggctggtacgaatcaaccgtcagggcgatgacctgcacattgaaacgcaaaacgttgcgccaccggacagccgtattgagctgatttccagcagcgaagctgactggaatgccttgcagagcgcgctgttgaagcttcgtttagcgactaccgcgtaa

SEQ ID NO: 7846 - protein, 328 aa, Shigella flexneri 2a str. 301
MTRTNLITGFLGSGKTTSILHLLAHKDPNEKWAVLVNEFGEVGIDGALLADSGALLKEIPGGCMCCVNGLPMQVGLNTLLRQGKPDRLLIEPTGLGHPKQILDLLTAPVYEPWIDLRATLCILDPRLLLDEKSASNENFRDQLAAADIIVANKSDRATPESEQALQRWWQQNGGDRQLIHSEHGKVDGHLLDLPRRNLAELPASAAHSHQHVVKKGLAALSLPEHQRWRRSLNSGQGYQACGWIFDADTVFDTIGILEWARLAPVERVKGVLRIPEGLVRINRQGDDLHIETQNVAPPDSRIELISSSEADWNALQSALLKLRLATTA

SEQ ID NO: 7847 - DNA, 855 bp, Shigella flexneri 2a str. 301
  CDS (1)..(855): transl_table=11
gtgattgaaaacgaattcggcgaagtctccgttgatgaccaactgattggcgaccgcgccacgcagatcaaaacgctgaccaacggctgcatctgctgttcgcgctccaacgagctggaggacgcactactcgacctgctggataatctcgacaagggcaatattcagttcgatcgtctggtgattgaatgcaccggcatggccgatcccggcccgattattcagacctttttctcccatgagattttatgccagctctacctgctggacggcgtgattgcgctggtggatgcggtacatgccgatgagcagatgaaccagttcaccatcgcccagtcccaggtgggctacgccgaccgtattctgctgactaaaaccgacgtcgcaggcgaagcagagaaactgcgtgaacgcctggcgcgcatcaacgcccgcgcaccggtctacaccgtcacccacggcgacatcgacctgggcctgctgttcaacaccaacggttttatgctggaagagaacgtcgtcagcaccaaaccgcgtttccactttatcgcggataaacaaaacgatatttcgtcaattgtggtggaactggattacccggtagatatcagcgaagtttcccgcgtgatggaaaacctgctgctggaatcggcggataaactgctgcgttacaaagggatgctgtggattgacggcgaacctaaccgcctgctgttccagggcgtccagcgcctctacagcgccgactgggacaggccgtggggcgatgaaaaaccgcatagcacaatggtgtttatcgggattcagttgccggaggaagagattcgggcggcgtttgcgggattgaggaagtaa

SEQ ID NO: 7848 - protein, 284 aa, Shigella flexneri 2a str. 301
MIENEFGEVSVDDQLIGDRATQIKTLTNGCICCSRSNELEDALLDLLDNLDKGNIQFDRLVIECTGMADPGPIIQTFFSHEILCQLYLLDGVIALVDAVHADEQMNQFTIAQSQVGYADRILLTKTDVAGEAEKLRERLARINARAPVYTVTHGDIDLGLLFNTNGFMLEENVVSTKPRFHFIADKQNDISSIVVELDYPVDISEVSRVMENLLLESADKLLRYKGMLWIDGEPNRLLFQGVQRLYSADWDRPWGDEKPHSTMVFIGIQLPEEEIRAAFAGLRK

SEQ ID NO: 7849 - DNA, 1098 bp, Shewanella oneidensis MR-1
  CDS (1)..(1098): transl_table=11
atgatagtcaaagccattcccaccaatatcatcacaggttttttaggtgtcggtaaaacatctttaattaaacagctacttaaaaccaaacccgagggggagacttgggccgtattggtgaatgaatttggtgaagtaggcattgatgcgtgtcttttagctgcaaacaacagtggggtgcaaattcgtgaagtcgcaggtggctgtatgtgctgtgctgcgggcgtaccgacccaagtggctatcaatcaactgatcgcccgagctaagcctgatagattgctgattgaacctacgggattggggcatcctaatgaaatcatcaaggtactcagcgccccccattatcaacatgttatccgccttcaaagtaccttgtgccttatcgatgcccgtaaattaatggatgaacgctaccgcgggcatgataattttatccagcagttgcaagtggccgatgtgattatcacaaccaaaactgatttataccctgagtttgaagcgctacatgaccaacaattggacttggaattagctcagtatctcaatgcgttacaactcgttgatacgccagttgtggagcatagtgcatcgcaaggcttatcaactcgtttacttgaataccttaagcagccacggcgtgatataccgagggcgccgagctacaaagccgctagcgtggtgagccaacctcagagtttactgcttaatagcgccgaaacattgggattacagggcgtatttgcaaagagcgttagcgaggatggtgattacattgaaccgcaagagagggtacgtaagcaaaatcaaggtgagggctgttttagctgtggatgggtatttaatcctttacaagaatttgattttgataagttaatgcaatttatctccgaacagactcaagtgaatcctactttgctgcgtgtgaaggctgtgatgattacgagcgatggcatagctgggatcaattggagcgatggggatatggctgtcactgaacttgatgatagcctagattctcggctggagatgattgcaacccaagatttggattgggatcgcatcgagcaggctttggttgagtgtttagttggttaa

SEQ ID NO: 7850 - protein, 365 aa, Shewanella oneidensis MR-1
MIVKAIPTNIITGFLGVGKTSLIKQLLKTKPEGETWAVLVNEFGEVGIDACLLAANNSGVQIREVAGGCMCCAAGVPTQVAINQLIARAKPDRLLIEPTGLGHPNEIIKVLSAPHYQHVIRLQSTLCLIDARKLMDERYRGHDNFIQQLQVADVIITTKTDLYPEFEALHDQQLDLELAQYLNALQLVDTPVVEHSASQGLSTRLLEYLKQPRRDIPRAPSYKAASVVSQPQSLLLNSAETLGLQGVFAKSVSEDGDYIEPQERVRKQNQGEGCFSCGWVFNPLQEFDFDKLMQFISEQTQVNPTLLRVKAVMITSDGIAGINWSDGDMAVTELDDSLDSRLEMIATQDLDWDRIEQALVECLVG

SEQ ID NO: 7851 - DNA, 1188 bp, Homo sapiens
  CDS (1)..(1188)
atgttaccggctgttggatctgcggatgaggaggaggatcctgcggaggaggattgtcctgaattggttcccatggagacgacgcaaagcgaggaggaggaaaagtctggcctcggcgccaagatcccagtcacaattatcaccgggtatttaggtgctgggaagacaacacttctgaactatattttgacagagcaacatagtaaaagagtagcggtcattttaaatgaatttggggaaggaagtgcgctggagaaatccttagctgtcagccaaggtggagagctctatgaagagtggctggaacttagaaacggttgcctctgctgttcagtgaaggacaatggccttagagctattgagaatttgatgcaaaagaaggggaaatttgattacatactgttagagaccactggattggcagacccaggtgcagtggcttctatgttttgggttgatgctgaattagggagtgatatttaccttgatggtatcataactatagtggattcaaaatatggattaaaacatttagcagaagagaaacctgatggccttatcaatgaagctactaggcaagttgctttggcagatgccattctcattaataaaacagacttggttccagaagaagatgtaaagaaattaagagcgacaattagatccataaatggactaggacaaatcttagaaacacaaagatcaagagttgatctctctaatgtattagatcttcatgcctttgatagtctctctggaataagtttgcagaaaaaacttcagcatgtgccaggaacacaacctcaccttgatcagagtattgttacaatcacatttgaagtaccaggaaatgcaaaggaagaacatcttaatatgtttattcagaatctcctgtgggaaaagaatgtgagaaacaaggacaatcactgcatggaggtcataaggctgaagggattggtgtcaatcaaagacaaatcacaacaagtgattgtccagggtgtccatgagctctatgatctggaggagactccagtgagctggaaggatgacactgagagaacaaatcgattggtcctccttggcagaaatttagataaggatatccttaaacagctgtttatagctactgtgacagaaacagaaaagcagtggacaacacatttcaaagaagatcaagtttgtacataa

SEQ ID NO: 7852 - protein, 395 aa, Homo sapiens
MLPAVGSADEEEDPAEEDCPELVPMETTQSEEEEKSGLGAKIPVTIITGYLGAGKTTLLNYILTEQHSKRVAVILNEFGEGSALEKSLAVSQGGELYEEWLELRNGCLCCSVKDNGLRAIENLMQKKGKFDYILLETTGLADPGAVASMFWVDAELGSDIYLDGIITIVDSKYGLKHLAEEKPDGLINEATRQVALADAILINKTDLVPEEDVKKLRATIRSINGLGQILETQRSRVDLSNVLDLHAFDSLSGISLQKKLQHVPGTQPHLDQSIVTITFEVPGNAKEEHLNMFIQNLLWEKNVRNKDNHCMEVIRLKGLVSIKDKSQQVIVQGVHELYDLEETPVSWKDDTERTNRLVLLGRNLDKDILKQLFIATVTETEKQWTTHFKEDQVCT

SEQ ID NO: 7853 - DNA, 612 bp, Pseudomonas putida KT2440
  CDS (1)..(612): transl_table=11
atgagcacccctgccccccataccaacgaagccgcgcggctgcccgtcactgtactttccggcttcctcggagccggcaagactaccttgctcaaccatattctgaacaaccgcgaaggccggcgagtcgcggtgatcgtcaacgacatgagcgatgtgaacatcgatgccgcactgatacgcaagggtggcgccgagctgtcacgcaccgacgaaaagctggtggagatgagcaatggctgcatttgctgcaccttgcgcgaagaccttctgctcgaagtggaccgtctagccaaagagggtcgtttcgaccaattggtcatcgaatcgacgggcatctccgagccactgccggtggcggaaaccttcaccttcgaaggcgaggatggccgtagcctcagcgaagtggcacgcctcgacaccatggtcaccgtggtcgatgccttcaatttcctgcgcgactacagctcgcgcgacagcctgcaggcacgcggtgaatcgctgggcgaggaagacgtgcgcaccgtggtcgacctgctgaccgatgaggaaatggcccagggaccggaaggctggataaagctgaccaaccccttccccggctggaactga

SEQ ID NO: 7854 - protein, 203 aa, Pseudomonas putida KT2440
MSTPAPHTNEAARLPVTVLSGFLGAGKTTLLNHILNNREGRRVAVIVNDMSDVNIDAALIRKGGAELSRTDEKLVEMSNGCICCTLREDLLLEVDRLAKEGRFDQLVIESTGISEPLPVAETFTFEGEDGRSLSEVARLDTMVTVVDAFNFLRDYSSRDSLQARGESLGEEDVRTVVDLLTDEEMAQGPEGWIKLTNPFPGWN

SEQ ID NO: 7855 - DNA, 1068 bp, Pseudomonas putida KT2440
  CDS (1)..(1068): transl_table=11
atgaaaacactggccaagctccccgtcaccatcgtcaccggcttcctcggctcgggcaagaccaccttgctgcgccacatgctcgacaacgctcaggggcgccgcattgcggtcatcgtcaacgaattcggcgaactgggcatcgatggcgaaatcctcaagcagtgcagcatcggttgcaccgaggaagaagccagcggccgtgtgtacgagctggccaacggctgcctgtgctgcaccgtgcaggaagaattcttcccggtgatgcgcgagctggtagcccgccgtggcgacctcgaccacatcctcatcgaaaccagcggcctggccctgcccaagccattggtacaagcgttccagtggccggaaatccgcaacgcctgcaccgtcgatgcggtcattaccgtggtcgacagcccggccgtggccgctggcacctttgccgcctacccggaccaggtcgatgcccagcgcaagctcgaccctaacctggaccatgaatcgcccctgcacgagctgttcgctgaccagctggccagcgccgacctggtggtgttgaacaaggccgacctgatcgacgccgaaggcctggccaaggtgcgtgccgaggtggccgaagaactgccgccggcggtgaaagtgatcgaggccagcagcggcaagctgccactggaggtgctgctgggcgtgggtgccgagtccgaggcgcatatcgatggccgccgaacccaccacgattcgcaccacgatggcgacgatcatgacgatcatgaccacgacgctttcgactccatctccatcgacctgcctgaagccgacgaaagcctgctgctcgatgcattgacccagttggtggtggagttcggtatcctgcgcgccaaaggcttcgccgccatcccgggcaagccgatgcggctgctggtacaaggcgtgggcacccgtttcgacaagcacttcgaccgcgcctggcgcgccgacgagccgcgcatcacccgcctggtgctgatcggccaggacctcgatgctgcccagctggaggcgcgcctgcgccaggcgctgggcgcctga

SEQ ID NO: 7856 - protein, 355 aa, Pseudomonas putida KT2440
MKTLAKLPVTIVTGFLGSGKTTLLRHMLDNAQGRRIAVIVNEFGELGIDGEILKQCSIGCTEEEASGRVYELANGCLCCTVQEEFFPVMRELVARRGDLDHILIETSGLALPKPLVQAFQWPEIRNACTVDAVITVVDSPAVAAGTFAAYPDQVDAQRKLDPNLDHESPLHELFADQLASADLVVLNKADLIDAEGLAKVRAEVAEELPPAVKVIEASSGKLPLEVLLGVGAESEAHIDGRRTHHDSHHDGDDHDDHDHDAFDSISIDLPEADESLLLDALTQLVVEFGILRAKGFAAIPGKPMRLLVQGVGTRFDKHFDRAWRADEPRITRLVLIGQDLDAAQLEARLRQALGA

SEQ ID NO: 7857 - DNA, 972 bp, Pseudomonas putida KT2440
  CDS (1)..(972): transl_table=11
atgcccattcccgtaaccgtcctcacaggcttcctcggtgccggcaagaccaccttgctcaagtacatgctcaaggccgagcatggcctgaagctcgccgtgatcgaaaacgaattcagcgaggccggcatcgacagccaactgctgggggaacagccggtgcaggtcatgaccttggccaacggttgtgtatgctgcagcatccatggcgacctgactcgcgcgctgtacctgctgcttgaacgcctggatgccggggaaatcgccttcgatcgcctggtgatcgaatgcaccggcctggccgacccggcgccggtcgcgcaaacgttcttcatcgacgaagagctgcgtgagcgctacatcctcgacggcatcatcacccttgtcgatgccgcgcatgccgaactgcacctgacccagaccatcgctcaggcgcaggtcggctttgccgatcgtctgctgctgagcaagaccgacctggtcgagccggctgcggttgaagccctgcgcgaacgcctggcccgcatcaatagcagggctgcgatccgtgtggtcgaacacggctgcatcgacctggctgagttactggatgtgcgaggtttcaacctcaaccctgaccttggggtgaacctgaaaccgatgttgcgaccggtgctcaagcctgccaccccggaccgcatttccacgatggtgctgcgtaccgaagccccgctggatatcgaccgcctcagcagcttcatgaacgagctgctggaaactcacggcaaacagctgctgcgctacaagggcgtgctgaacattgccggcgaggagcgcaagctggtgtttcagggcgtgctcaagctttatggcttcgactgggacgccgagtgggccgcaggcgaagcgcgcgagagcgtgatggtgttcattgccgatgaactgcccgaggctacgattcgggctggcttcgaggcaatggctgcgggctga

SEQ ID NO: 7858 - protein, 323 aa, Pseudomonas putida KT2440
MPIPVTVLTGFLGAGKTTLLKYMLKAEHGLKLAVIENEFSEAGIDSQLLGEQPVQVMTLANGCVCCSIHGDLTRALYLLLERLDAGEIAFDRLVIECTGLADPAPVAQTFFIDEELRERYILDGIITLVDAAHAELHLTQTIAQAQVGFADRLLLSKTDLVEPAAVEALRERLARINSRAAIRVVEHGCIDLAELLDVRGFNLNPDLGVNLKPMLRPVLKPATPDRISTMVLRTEAPLDIDRLSSFMNELLETHGKQLLRYKGVLNIAGEERKLVFQGVLKLYGFDWDAEWAAGEARESVMVFIADELPEATIRAGFEAMAAG

SEQ ID NO: 7859 - DNA, 1209 bp, Pseudomonas putida KT2440
  CDS (1)..(1209): transl_table=11
atgtccaatcgtcttcccgtcaccgtgctgtccggctttttgggcgccggcaagagcacgctgctcaaccatgtgctgcgcaaccgcgacaacctgcgggtggcggtaatcgtcaacgatatgagtgaaatcaacattgatgcaagtgaggtgcagcgcaatgtcagcctcaaccgcgctgaagagaaactggtcgagatgagcaacggctgcatttgctgcacgttgcgcgaagacctgctcgaggaggttgcgcgactggccgaagaggggcgtttcgattatttgctgatcgagtccaccggtatctctgagccactgccagtggctgagaccttcactttccgcgacgagcagggtcgcagtctgtccgatatggcgcgactggacaccatggtcaccgtggtcgatggcttgaacttcctgcgcgactatcaggcagcagacagcctggccagccggggcgaaacgttgggcgaagaagacgagcggtcgatcagtgatttgctgatcgagcaggtcgagttcgcagatgtgctgctgctgagcaagatcgacctgatcagccaacatgagcgcgaagaactcatcgctattttgcgcagtctcaatgcccgagcgcagatcgtacccatggtcatgggccaagtgccgttggcacgtatcctcaacaccaggctgttcgacttcgatcaggcggcccaggcaccaggctggttgcaggagctgcgcggtgaacatgtaccagaaaccgaagagtacggtatcgcggccatgacctggcaggctcgacgcccgcttcatccacagcgcttttacgactttatccacaaggactgggaaaacggaaggctactgcgttccaaagggtttttctggttggccagcaaatatcaggaagctggcagctggtcgcaagcgggcggcatgatgcgccatggtctggctggccgctggtggcgcttcgtgccacgcgagcagtggccacaggatgtggataacacgaatgcgatcttgaaacactggaccgccgacaccggtgactgccgacaggagttggtgtttattgggcagaatatcgacgtcgaaaaattatccacagccctggatgcatgcctgttgacggatcaagaaatgggcttgggtcacatgggctggctgcgtttacctgacccatttggcccatggcatgaggaagcggcagcatga

SEQ ID NO: 7860 - protein, 402 aa, Pseudomonas putida KT2440
MSNRLPVTVLSGFLGAGKSTLLNHVLRNRDNLRVAVIVNDMSEINIDASEVQRNVSLNRAEEKLVEMSNGCICCTLREDLLEEVARLAEEGRFDYLLIESTGISEPLPVAETFTFRDEQGRSLSDMARLDTMVTVVDGLNFLRDYQAADSLASRGETLGEEDERSISDLLIEQVEFADVLLLSKIDLISQHEREELIAILRSLNARAQIVPMVMGQVPLARILNTRLFDFDQAAQAPGWLQELRGEHVPETEEYGIAAMTWQARRPLHPQRFYDFIHKDWENGRLLRSKGFFWLASKYQEAGSWSQAGGMMRHGLAGRWWRFVPREQWPQDVDNTNAILKHWTADTGDCRQELVFIGQNIDVEKLSTALDACLLTDQEMGLGHMGWLRLPDPFGPWHEEAAA

SEQ ID NO: 7861 - DNA, 996 bp, Escherichia coli CFT073
  CDS (1)..(996): transl_table=11
atggtaaaggcggtatgcgctgttgttaatggagagagcatgaacccgattgcagttaccctactcaccggttttttaggcgcaggcaaaaccaccctgctgcgccatattcttaatgaacaacacggctacaagattgccgtgattgaaaacgaattcggcgaagtctccgttgatgatcaactgattggcgatcgcgccacgcagatcaaaacgctgaccaacggctgcatctgctgttcgcgctccaacgagctggaagacgccctactcgacctgctggataatctcgacaagggcaatattcagttcgaccgtctggtcattgaatgcaccggcatggccgatcccggcccgattattcagacctttttctcccatgagattttatgccagcgttacctgctggatggcgtgattgcgctggtggatgcggtacatgccgatgagcagatgaaccagttcaccatcgcccagtcacaggttggctacgccgaccgtattctgctgactaaaaccgacgtcgcaggcgaagcagaaaaactgcgtgaacgcctggcgcgcatcaacgcccgtgcaccggtctacaccgtcacccacggcgacatcgacctgggcctgctgttcaacaccaacggttttatgctggaagaaaacgtcgtcagcaccaagccacgttttcactttatcgcggacaaacaaaacgatatttcgtcgattgtggtggaactggattacccggtagatatcagcgaagtttcccgggtgatggaaaacctgctgctggaatcggcggataaactgctgcgttacaaagggatgctatggattgacggcgaacctaatcgcctgctgttccagggcgtccaacgcctctacagcgccgactgggaccgcccgtggggcgatgaaaaaccgcatagtacgatggtgtttatcgggattcagctgccggaagaagagattcgggcggcgtttgctgggttgaggaagtaa

SEQ ID NO: 7862 - protein, 331 aa, Escherichia coli CFT073
MVKAVCAVVNGESMNPIAVTLLTGFLGAGKTTLLRHILNEQHGYKIAVIENEFGEVSVDDQLIGDRATQIKTLTNGCICCSRSNELEDALLDLLDNLDKGNIQFDRLVIECTGMADPGPIIQTFFSHEILCQRYLLDGVIALVDAVHADEQMNQFTIAQSQVGYADRILLTKTDVAGEAEKLRERLARINARAPVYTVTHGDIDLGLLFNTNGFMLEENVVSTKPRFHFIADKQNDISSIVVELDYPVDISEVSRVMENLLLESADKLLRYKGMLWIDGEPNRLLFQGVQRLYSADWDRPWGDEKPHSTMVFIGIQLPEEEIRAAFAGLRK

SEQ ID NO: 7863 - DNA, 987 bp, Vibrio vulnificus CMCP6
  CDS (1)..(987): transl_table=11
atgtcgatgagtaaaaagccaattccagtcactatcttagccggatttttaggggcaggtaaaaccaccttgctcaatcacattctgaccaatgccaatggaatgcgcatggccgttatcgtcaatgactttggttcgataaatgttgatgctgaactggtaaaatctgaaagcgacaatatgatcagcctagaaaatggttgtgtttgttgtaatctcgctgaaggtttagtggtttctgtgatgcgtttattagcactcgaacaacgtccagaccacattgtggtagaaacgtctggtatttcagaaccaaaagaagtggcgctgaattttgaagatcctgagctgcaacagcatgcgcctctcaatgcgattatcaccaccattgatgctaaaaatgtactcactcttgaaaaacagatggcagaattagctgaacagcaaattcaagtagctgatattgttttgatcaataaagtcgatctggtagagccagatgagctagcaaaagttaaacaatggtgtcaggtacaagcgccatttgcaaagctggttgaaatagagtttggtaaagtcgatttgcctattttatttgaagtaccagagaggcttcaggtttcatcccataacagagaacatggtggcgagcaccatcactgccatgatgaccattgtgatcacgttaaccatcagtttgaaacattcagttttgaaacagatcgtcccctttcactgcaagccttgtaccctctattacagcagttttctatcgatgcttatcgcatgaaaggcatcttaaacctagatgatcgacccgatcaccgttgtattttccaatgcacaggacaacgtgcacaagtgaccattggcgaaccatggcaagaaggcgaaacaagagccacgcgtcttgtttttatcggcccaaaagggggattagatagggatggaatgcgcaaaaaattggacgctcttgtgatccaacaataa

SEQ ID NO: 7864 - protein, 328 aa, Vibrio vulnificus CMCP6
MSMSKKPIPVTILAGFLGAGKTTLLNHILTNANGMRMAVIVNDFGSINVDAELVKSESDNMISLENGCVCCNLAEGLVVSVMRLLALEQRPDHIVVETSGISEPKEVALNFEDPELQQHAPLNAIITTIDAKNVLTLEKQMAELAEQQIQVADIVLINKVDLVEPDELAKVKQWCQVQAPFAKLVEIEFGKVDLPILFEVPERLQVSSHNREHGGEHHHCHDDHCDHVNHQFETFSFETDRPLSLQALYPLLQQFSIDAYRMKGILNLDDRPDHRCIFQCTGQRAQVTIGEPWQEGETRATRLVFIGPKGGLDRDGMRKKLDALVIQQ

SEQ ID NO: 7865 - DNA, 987 bp, Vibrio vulnificus CMCP6
  CDS (1)..(987): transl_table=11
atgaacaacaaggttccggcgaatatcattacgggttttctcggtgtaggaaaaaccaccaccattctcaatttactgaaagaaaagccagccaatgaaaagtgggcggttttggtgaatgagtttggcgagattggcattgacggtgcaatgatgaccgacagcggcgcgctgatcaaagaagtaccgggtggctgtatgtgctgcactgcaggcgtgccgatgagtgttggtatcaacacattgctgcgtcaaaagcccgatcgtctgcttatcgaaccaacagggcttggtcacccgaaacaagtgattgccacattgacgtctgcgcaatatgaaccgtatgtcgatctcaaagcgaccattgcgctggtggacccacgcaacctcagcgatgaaaagtacctgaacaaccagaactttaacgaccaactcgacagtgcggatgtggtgattggcagtaaagtggacctttgtacttcgcatgacattgacgttttcaatgattgggtgaccgaccaatcgccttccaaagtctttagtaagttgattcacgatggtcagttgccgatagaagttctggatattgaacgtgtttacggcagtgcttcaacacatattgaaccgcatcaccaccatcatgcggagatggagccacagtttgaattgccacctggtcgtgcgtttgtgcgcaaagagaataaaggccaagggtattacagttgtggttggctaattggtgctgaatatcgctttgagtttgaggcgcttttttcaatgttctcagcattaactgcagagcgagtgaaagcggtagtgaacacagatcaaggctgttacgcctttaacgtcgccaatggcgttgtgtcggtgaatcaaatgagcttggaaggattcgaatccagaatcgaagttatcgattcacagctaatgccatgggatgaacttgaaacgatcctgctgaaattggcgaatattcacgaataa

SEQ ID NO: 7866 - protein, 328 aa, Vibrio vulnificus CMCP6
MNNKVPANIITGFLGVGKTTTILNLLKEKPANEKWAVLVNEFGEIGIDGAMMTDSGALIKEVPGGCMCCTAGVPMSVGINTLLRQKPDRLLIEPTGLGHPKQVIATLTSAQYEPYVDLKATIALVDPRNLSDEKYLNNQNFNDQLDSADVVIGSKVDLCTSHDIDVFNDWVTDQSPSKVFSKLIHDGQLPIEVLDIERVYGSASTHIEPHHHHHAEMEPQFELPPGRAFVRKENKGQGYYSCGWLIGAEYRFEFEALFSMFSALTAERVKAVVNTDQGCYAFNVANGVVSVNQMSLEGFESRIEVIDSQLMPWDELETILLKLANIHE

SEQ ID NO: 7867 - DNA, 981 bp, Vibrio vulnificus CMCP6
  CDS (1)..(981): transl_table=11
atgtcgatgagtaaaaagccaattccagtcactatcttagccggatttttaggggcaggtaaaaccaccctgctcaatcatattctgaccaatgccaatggaatgcgcatggccgttatcgtcaatgactttggttcgataaatgttgatgctgaactggtaaagtctgaaagcgacaatatgatcagcctagaaaatggttgtgtttgttgtaatctcgctgaaggtttagtggtttctgtgatgcgtttattagcactcgaacaacgtccagatcacattgtggtagaaacctctggaatttcagaaccaaaagaagtggcgctgaattttgaagatccagaactacaacagcatgcgcccctcaatgcgattatcaccaccattgacgctaaaaatgtactaacgctcgaaaaacagatggcagaattagctgaacagcaaattcaagtcgctgatattgttttggtcaataaagtcgacctagtagagccagaagagctagcaaaagttaaacaatggtgtcaggtacaagcgccatttgcaaagctggttgaaattgagtttggtaaagtcgatttacctattttatttgaagtaccagagaggcttcaggtttcatcccataacagagaacatggtggcgagcaccatcactgtcatgatgaccattgtgatcacgttagccatcagtttgaaacattcagttttgaaacagagcatcccctttcactgcaagccttgtaccctctgttgcagcagttttctatcgatgcatatcgcatgaaaggcatcttaaaccttgatgataaacccgatcaccgttgtattttccaatgcacaggacaacgtgcacaggtgacgattggcgatccatggcaagagggtgaaaaaagagcgactcgacttgttttcatcggccctaaagggggattagataggaatgttatgcgcaagaaattggacgctcttgtgatctaa

SEQ ID NO: 7868 - protein, 326 aa, Vibrio vulnificus CMCP6
MSMSKKPIPVTILAGFLGAGKTTLLNHILTNANGMRMAVIVNDFGSINVDAELVKSESDNMISLENGCVCCNLAEGLVVSVMRLLALEQRPDHIVVETSGISEPKEVALNFEDPELQQHAPLNAIITTIDAKNVLTLEKQMAELAEQQIQVADIVLVNKVDLVEPEELAKVKQWCQVQAPFAKLVEIEFGKVDLPILFEVPERLQVSSHNREHGGEHHHCHDDHCDHVSHQFETFSFETEHPLSLQALYPLLQQFSIDAYRMKGILNLDDKPDHRCIFQCTGQRAQVTIGDPWQEGEKRATRLVFIGPKGGLDRNVMRKKLDALVI

SEQ ID NO: 7869 - DNA, 1203 bp, Staphylococcus epidermidis ATCC 12228
  CDS (1)..(1203): transl_table=11
atggcgaaaatacctgtaactgtattaagtggatatttagggtcgggcaaaacgacattgcttaatcatatattaaaaaatagagaagggcgacgcattgctgtcatagtcaatgatatgagtgaagttaatattgataaggatttagtagcacaaggtggcggcttatctagaacagatgagaaattagtagaactttctaatggatgcatatgttgtactttaagagacgatttgttacgagaagtcgagcgcttagttcacaaagggggtatcgatcaaattgtaattgaatcaactgggatatctgagcctgtaccagtagctcaaacgttctcatacatagatgaagaattaggtattgatttaacctctatatgtcgattagatacaatggtgacggttgtagatgcgaatcgctttgttaatgatattcgtagtgaagatttattggcagaccgtgatgaaagtgttgatgatgaagatgagcgtactattgctgacttactcattgatcaagtagaattttgtgatgtgatgattatcaataaaatcgatttgattagcgacaaagctttagaaaaattagaaaatgtattacgtgcattgcaacccgaagctaaaattattaaaacagtaaatgctaaagtggaattatcagatgtacttaatacgcaattatttgattttgagaaggcaagtgaatcagctggatggatcaaagaattaacagctggaggacatgcgacacatacgccggaaacagaagagtatgggattacatcatttgcttatactagacgattaccatttcatgcaaaaagatttcatcaatggctagaacaaatgccagaaaatattgtaagaacaaaagggattgtatggttagcgcagtataatgatgtagcgtgtttgttatcacaggctggttcatcttgtaatattcaccccgttacatactgggtggcaacaatgagtgaaagtcaacagcaagctattttggaggcgcgtcaagatgtagtagaagattgggatatcgaatatggagatcgtcaaacgcaatttgtaattattggtacggatttagatcaagaaaaaatttcccgggaattagatgcatgcttaattcatagtagtgagattgatgaagattggcgattactagatagtccgtatcaatggacttatgatcgacgaatgtaa

SEQ ID NO: 7870 - protein, 400 aa, Staphylococcus epidermidis ATCC 12228
MAKIPVTVLSGYLGSGKTTLLNHILKNREGRRIAVIVNDMSEVNIDKDLVAQGGGLSRTDEKLVELSNGCICCTLRDDLLREVERLVHKGGIDQIVIESTGISEPVPVAQTFSYIDEELGIDLTSICRLDTMVTVVDANRFVNDIRSEDLLADRDESVDDEDERTIADLLIDQVEFCDVMIINKIDLISDKALEKLENVLRALQPEAKIIKTVNAKVELSDVLNTQLFDFEKASESAGWIKELTAGGHATHTPETEEYGITSFAYTRRLPFHAKRFHQWLEQMPENIVRTKGIVWLAQYNDVACLLSQAGSSCNIHPVTYWVATMSESQQQAILEARQDVVEDWDIEYGDRQTQFVIIGTDLDQEKISRELDACLIHSSEIDEDWRLLDSPYQWTYDRRM

SEQ ID NO: 7871 - DNA, 1050 bp, Bradyrhizobium japonicum USDA 110
  CDS (1)..(1050): transl_table=11
atgaactcgctcgcaaaagtcccggtcacggtggtcaccggctttctcggctccggcaagacgacgctgatccagcatttgctcgccaaccccaacggcaagaagctcgcggtgctcgtcaacgagttcggcagcgagggcgtcgacggccagatcctgaagtcctgcgccgatgccaattgcccggaggaaaacatcgtcgagctcgccaatggctgcatctgctgcaccgttgccgacgatttcatcccgaccatggagctgttgctggcgcggccggtgaggcccgatcacatcctgatcgagacctcgggcctggcgctgcccaagcccttgcttagggcgttcgactggccggagatccgttcgcgcatcaccgttgacggtgtgatcgcgctggccgatgccgaggccgtcgccgccggccgtttcgcgccggacccggccgcagtggaagcgcagcgggcggcggacgaaaatctcgatcacgagacgccgctgtcggaagtgttcgaggaccagatcgcctgcgccgacatcgtgctgctgaccaaggccgatcttgccggcccggcgggactcgaagcggccaaggctgccatcaccgccgagatgccgcgccgcgtgccgatgcttgccgttaccgacggcgcgatcgatgcgcgcgtcatcctcggtctcggtgccgccgccgagaatgatcttgccgcgcgcccgtcgcatcacgacggcgaggaggagcatgagcacgacgattttgcgtccgtcgtgatcgatcttccggaagtcggcgacgtcgatgcgctggtcgcctcggttcagcgcctggcgcgcgagcagaacgtgctgcgtgccaagggttacatcgcggtcgcgggcaagccgatgcgcctgctgctccaggccgtcggcgagcgcgtgcgtcaccagttcgacaagccctggggcgcgctcgcgcggcagtcaaagctcgtcgtgatcggcgagcacggcgatatcgacgaggccgcgataagagcgggacttggtctttcaggatctggcatctga

SEQ ID NO: 7872 - protein, 349 aa, Bradyrhizobium japonicum USDA 110
MNSLAKVPVTVVTGFLGSGKTTLIQHLLANPNGKKLAVLVNEFGSEGVDGQILKSCADANCPEENIVELANGCICCTVADDFIPTMELLLARPVRPDHILIETSGLALPKPLLRAFDWPEIRSRITVDGVIALADAEAVAAGRFAPDPAAVEAQRAADENLDHETPLSEVFEDQIACADIVLLTKADLAGPAGLEAAKAAITAEMPRRVPMLAVTDGAIDARVILGLGAAAENDLAARPSHHDGEEEHEHDDFASVVIDLPEVGDVDALVASVQRLAREQNVLRAKGYIAVAGKPMRLLLQAVGERVRHQFDKPWGALARQSKLVVIGEHGDIDEAAIRAGLGLSGSGI

SEQ ID NO: 7873 - DNA, 1047 bp, Bradyrhizobium japonicum USDA 110
  CDS (1)..(1047): transl_table=11
atgtctgaagcgacctcccagaaaattcccgtgaccgtcctgaccggctatctcggcgccggcaagacaacgcttttgaaccgcatcctttcggaaaaccacggcaagaaatacgccgtcatcgtcaacgagttcggcgagataggcatcgacaacgacctcatcatcggcgccgatgaggaagtgttcgagatgaacaatggctgcatctgctgcaccgtgcgcggcgacctcgtgcgcatcatggacgggctgatgaagcgcaagggcaagttcgacgccatcatcgtcgagaccacgggccttgccgatccggcgccggtggcccagaccttctttgtcgacgaggacgtgcagaagaacgcgcgcctcgacgcggtggtgacggttgccgacgccaaatggctgtccgaccgtctgaaggacgcgcccgaggccaagaaccagatcgcctttgccgacgtcatcgtgctgaacaagaccgatctcgtcaccaagggtgagctcgccgaggtcgaggcccgcatccgcgccatcaacccctatgcgaaactccaccgcaccgagcgctgctcggtggcgctggccgacgtgctcgaccgcggcgcgttcgacctcgaccgcatcctcgacatcgagccggactttttggaggccgacgatcacgaccacgaccatgatcatcaccaccacggccacgaccatcatcaccacgatcacggccacggcctgaagcactatcacgacgaggacatgcaatcgctgtcgctcaagaccgacaagccgctcgacccgaacatgttcatgccctggctccagaacctggtgcaggtcgagggcggcaagatcctgcgctccaagggcatactcgccttccacgacgacgatgaccgctacgtcttccagggcgtccatatgatgctggagggtaaccaccagcggaaatggaaggacggcgagccgcgcgagagccgcctcgtcttcatcggccgcgaattgccggaagaggccatccgcaagggttttgagagctgcatcgtctcgtga

SEQ ID NO: 7874 - protein, 348 aa, Bradyrhizobium japonicum USDA 110
MSEATSQKIPVTVLTGYLGAGKTTLLNRILSENHGKKYAVIVNEFGEIGIDNDLIIGADEEVFEMNNGCICCTVRGDLVRIMDGLMKRKGKFDAIIVETTGLADPAPVAQTFFVDEDVQKNARLDAVVTVADAKWLSDRLKDAPEAKNQIAFADVIVLNKTDLVTKGELAEVEARIRAINPYAKLHRTERCSVALADVLDRGAFDLDRILDIEPDFLEADDHDHDHDHHHHGHDHHHHDHGHGLKHYHDEDMQSLSLKTDKPLDPNMFMPWLQNLVQVEGGKILRSKGILAFHDDDDRYVFQGVHMMLEGNHQRKWKDGEPRESRLVFIGRELPEEAIRKGFESCIVS

SEQ ID NO: 7875 - DNA, 1329 bp, Xylella fastidiosa Temecula1
  CDS (1)..(1329): transl_table=11
atgtcaacgctgacgctcccctccgatctccgcttacctgtcaccgttttctcgggtttccttggtgccggtaagacaaccctactgaatcgcctcttgaataatcgtgatggtctgcgtgtggcagtgatcgttaacgacatgagcgaagtcaacattgatgcacagttggtacgtgatggcggtgctgctctcagccgtaccgatgaaacattggttgaattcagcaacggatgtatctgctgcactctacgcgatgatttatccaaggaggtcaaacgtcttgcgttggagcaacgctacgattacctgttgatcgaatccacaggcattggcgagccaatgcctgtcgcggcaacatttgctgtgcgggatgccgacggcttttgtctttcagatgtagcgcgtttggataccatggtcacggtcgttgatggtagccaatttactgcgctattcagctcaatgaatacattagctgacttaggtcagcaagcagattccgacgatactcgcagccttgccgacctgcttggccaacagatcgagtttgctgacaccattgtcatcagcaaatgtgatctgattgatgcgacgcaacttgcgcgcgtgcgtgcagtggtgcgcgggcttaaccgtgacgcacagatcattgaagcacatcttggagaagtacccctgccccaactcgttggtactgggcgtttcgatttcactcgcgcgcaacttgcgccaggttggatgcgcgagctacgtggcgaacatactcctgagaccgaagagtacgggatcaccagctttgtttaccgcgcgcgccgtccattccacccattacgcttcaaccatttgcttgctcatgggttgtctggtgtgattcgcagcaagggcttcttctggttagcaagtcgtatggattgggttggcgaattatccagcgttggtagtgccacgcgcactcaagcagccgggttttggtatgccgcacggcaccgtgtcgacgtacatgaggaaaatatgccaccgcagattggcatcgccccactgccctacaccgaactaggttggcaacgtcaacagaatgattgttggaccgcaccattgcctgcgccgcatgaggtgagcgatcctggcgaatatgtggcgatgcagcgtctatggcatccacaatggggcgaccgccgacaagaattggcggtcattgggttggatatggataaggatgttgcacgtaatgaattagatgcttgcctgctcagcaacgaagagctgaggatggggccaatgtattggagcgcactaccagatccattcccacagtggcgccgctga

SEQ ID NO: 7876 - protein, 442 aa, Xylella fastidiosa Temecula1
MSTLTLPSDLRLPVTVFSGFLGAGKTTLLNRLLNNRDGLRVAVIVNDMSEVNIDAQLVRDGGAALSRTDETLVEFSNGCICCTLRDDLSKEVKRLALEQRYDYLLIESTGIGEPMPVAATFAVRDADGFCLSDVARLDTMVTVVDGSQFTALFSSMNTLADLGQQADSDDTRSLADLLGQQIEFADTIVISKCDLIDATQLARVRAVVRGLNRDAQIIEAHLGEVPLPQLVGTGRFDFTRAQLAPGWMRELRGEHTPETEEYGITSFVYRARRPFHPLRFNHLLAHGLSGVIRSKGFFWLASRMDWVGELSSVGSATRTQAAGFWYAARHRVDVHEENMPPQIGIAPLPYTELGWQRQQNDCWTAPLPAPHEVSDPGEYVAMQRLWHPQWGDRRQELAVIGLDMDKDVARNELDACLLSNEELRMGPMYWSALPDPFPQWRR

SEQ ID NO: 7877 - DNA, 1029 bp, Clostridium tetani E88
  CDS (1)..(1029): transl_table=11
ttgtattataaaaacatacctatttttactaaaagttttttatttactattttaaaaggagttgattacatgaaaacaaaaatagatattttctcaggattcttaggtgctggtaaaactgtgctaataaaaaaattaataagcgaaaaactttataatgacaaaatagttattatcgaaaacgaatttggtgaagttggtattgatggaactattctaaaaaaatcaaatatacaagtaaaagaaataaatgctggttgtatatgttgtacagttactggaaactttaatgattctataaaagaagttattgaaaaatataatccagaacgaattataatagaaccatcaggtgtagcaaaactttctgaaatattagatatatgtaaaaagcatgaattaaaagatatactatccataaatatgattattactgtagttgatgtattacgatttaatatgtatattacaaattttaatgatttttacaaaaatcaaattgtcaatgctaaaactattatattaactagaacagagaacttatcacctgaaaacctattaaaaacagtagaaaaaattaaacaaataaattctaaagcagctatcatctcaactaattggagtaatttacctgcaactaaaataattaaagttgctgaaaaagacttatatagtccacaatttaaaagttttactttattaaagccgactacaaataaaatctcagttaaacataaaattaaaaatattaccaatgaaacatttgagtcctttggaatagaaactcctaaattatttccaaaagaaactttaaatgttatattacataaactggaaaatagtaattattatggaacaattttaagggcaaaaggaattgttcaagtaaatgaaaaagaatggcttcaatttgattatgtccctgaagaattaaacataaaaacaagttccccagattatacaggaaaaatttgtgttataggtactaatttaaataagttagcattagaaaatttatttttatcttaa

SEQ ID NO: 7878 - protein, 342 aa, Clostridium tetani E88
MYYKNIPIFTKSFLFTILKGVDYMKTKIDIFSGFLGAGKTVLIKKLISEKLYNDKIVIIENEFGEVGIDGTILKKSNIQVKEINAGCICCTVTGNFNDSIKEVIEKYNPERIIIEPSGVAKLSEILDICKKHELKDILSINMIITVVDVLRFNMYITNFNDFYKNQIVNAKTIILTRTENLSPENLLKTVEKIKQINSKAAIISTNWSNLPATKIIKVAEKDLYSPQFKSFTLLKPTTNKISVKHKIKNITNETFESFGIETPKLFPKETLNVILHKLENSNYYGTILRAKGIVQVNEKEWLQFDYVPEELNIKTSSPDYTGKICVIGTNLNKLALENLFLS

SEQ ID NO: 7879 - DNA, 1065 bp, Pseudomonas syringae pv. tomato str. DC3000
  CDS (1)..(1065): transl_table=11
atgaaaacactggccaagcttcccgtcaccatcgttaccggcttcctcggctcgggcaagaccacgctgttgcggcacatgctcgacaacgccgaagggcgacgcatcgcggtgatcgtcaacgagtttggcgagctgggcatcgacggtgaaatcctcaagcaatgcaccatcggctgcacggaagaagaagccaacggccgcgtctacgagttggccaatggctgcctgtgctgcacggtgcaggaagagttcttcccggtcatgcgcgaactggtggcccggcgtggtgatctggaccacatcctgatcgaaacctcggggcttgccctgcccaagccgctggtgcaagccttccagtggccggaaatccgcaacgcctgcacggttgacgccgtgatcaccgtggtcgacagcccggccgtgttggcgggtacgtttgcagcctttccggatcaggtcgatgcacagcgcaaactggaccccaacctggaccacgaatcgccgctgcacgagctgttcgccgaccaactggccagcgccgatctggttatcctcaacaaggccgacatgatcgacgccgaagggctggccgccgtgcgcgctgaagtcgccgaagagctgccgcctgcggtcaaggtggttgaagccagcagtggtcgcctgccgatcagtgttctgctgggcgtgggtgccgagtccgaactgcacatcgacgcgcgcaagacccaccacgatcatcacgacgatgacgatcatgatgaccacgatcacgacgcgttcgattcaatttccctgacattgccccaggctgacgagaaagtgctgctcgatgcgctgaatcaactggtcgtgcaacacggcattctgcgtgtaaaaggttttgcggcaattccgggcaaaccgatgcgcctgctgatccagggtgtcggcacgcgtttcgacaagcacttcgaccgtgcctggcgtgccgacgaagagcgcgccacgcatctggtgctgattggccaggaactggacgcggttgcgctgcacgctcagctcaacgctgcgattgccggctga

SEQ ID NO: 7880 - protein, 354 aa, Pseudomonas syringae pv. tomato str. DC3000
MKTLAKLPVTIVTGFLGSGKTTLLRHMLDNAEGRRIAVIVNEFGELGIDGEILKQCTIGCTEEEANGRVYELANGCLCCTVQEEFFPVMRELVARRGDLDHILIETSGLALPKPLVQAFQWPEIRNACTVDAVITVVDSPAVLAGTFAAFPDQVDAQRKLDPNLDHESPLHELFADQLASADLVILNKADMIDAEGLAAVRAEVAEELPPAVKVVEASSGRLPISVLLGVGAESELHIDARKTHHDHHDDDDHDDHDHDAFDSISLTLPQADEKVLLDALNQLVVQHGILRVKGFAAIPGKPMRLLIQGVGTRFDKHFDRAWRADEERATHLVLIGQELDAVALHAQLNAAIAG

SEQ ID NO: 7881 - DNA, 1008 bp, Pseudomonas syringae pv. tomato str. DC3000
  CDS (1)..(1008): transl_table=11
atgagcattgccctcaacgtgatcaccggctttctcggcagcggcaagaccacactgctcaagcgcctgctggccgatgaaaacatgggcgacaccgcgctgctgatcaacgagttcggtgatgtcggtatcgatcatctgcttgttgaagaggttgcgccggacaccgtgctgttacccagcggttgcgtttgctgcaccgttcgcggcgagctgaaggatgctttgctgggcctgctggaacggcgcaatcgtggcgagattccggcgtttcgccgggtgattctggaaaccaccggcctggccgatccggccccgatcctctcgaccctgagcaacgatccgcaactgcgcggacgctttcacatcggcctgatcatcacgctggtggacgcctgccacgcaaccctgcaagagcgcctgcacccggagtggctggcgcaaatcgcggcggcggaccggctgttgctgagcaagaccgatctggtggacgagcctgcactcgacgcgctgcgtaagcacctgcaggccttgaatttttccgcgccgttgctggacaccgcgcagatccacagcggcgatcagttgctgctcggggagggcgtgcgcagtgccgaaccggctgccgaggtaacacgctggcaactgcatcgcgtcgagtcgaggtcggcgcggcatggtgatgcgcaggtctgctgcctgaccttcgaccgcccgctcgactgggttggtttcggggtgtggctgtcgatgctgttaagatgccacggcgaacgaatccttcgcgtcaaaggactgctcaacgtgaacgacaaccaggcccccatcgtgattcatggtgtgcagcattgcctgcatgcaccggtgcaccttgcggcatggccgggtgaggatcgcacctcgcggctggtgttcatcctgcgaggtctggatgcggagttattacggcgctcgttcgaggtgttctccagcagcttcgcgccgccgctcaacgagtcggcggcatga

SEQ ID NO: 7882 - protein, 335 aa, Pseudomonas syringae pv. tomato str. DC3000
MSIALNVITGFLGSGKTTLLKRLLADENMGDTALLINEFGDVGIDHLLVEEVAPDTVLLPSGCVCCTVRGELKDALLGLLERRNRGEIPAFRRVILETTGLADPAPILSTLSNDPQLRGRFHIGLIITLVDACHATLQERLHPEWLAQIAAADRLLLSKTDLVDEPALDALRKHLQALNFSAPLLDTAQIHSGDQLLLGEGVRSAEPAAEVTRWQLHRVESRSARHGDAQVCCLTFDRPLDWVGFGVWLSMLLRCHGERILRVKGLLNVNDNQAPIVIHGVQHCLHAPVHLAAWPGEDRTSRLVFILRGLDAELLRRSFEVFSSSFAPPLNESAA

SEQ ID NO: 7883 - DNA, 978 bp, Pseudomonas syringae pv. tomato str. DC3000
  CDS (1)..(978): transl_table=11
atgaccgagttgcaacccatcccagtgaccgtgctgaccggttttctgggcgcaggcaaaaccaccttgctgcgccacctgctcaaggccgaacacggcctgaaaatcgccgtgatcgaaaacgaattcagcgatgccggtatcgacagccagttgctgggcaccgacccggtgcagatcatgaccctgtccaacggctgtgtgtgctgcaccattcacaccgacctgaccaaagcgctttacctgttgctggagcgtctggacagcggcgaaattgccttcgaccgactggtgatcgaatgcaccggcctggccgatcctgcgcccgtcgcccagacctttttcatcgatgaagaactgcgcgagcgctacatcctcgacggcatcatcacgttggtcgacgctgcccacgccgacacccacctgacgcaaaccatcgcccaggcgcagatcggctttgccgaccgcttgctggtcagcaagcgcgatctggtcgacgacgcagccttcgatgccctcagcgcacgcctgacccgcatcaaccgccgcgccccgatccgcatcgtcgagcacggcaagatcgacctcgccgagctgctcgacgtacgtggcttcaacctcaacgccgatctgggcggcagcatgaccctgcgcccgctggccccggccggtaaatccagcgaccgcatcaccagcctcgtcctgcgcagcgacaaacccctgaacctggaccgcctcagcgagttcatgaacgaactgctcgaagaccacggcaagcaactgctgcgctataaaggcgtgctcaacattgaggatgaaccgcgcaaaatggtatttcagggcgtgctcaaactgtacggctttgactgggatactgaatgggccgagggcgagctgcgtgagagcgtgatcgtgtttattgccgatgagttgccggaggagaagattcgggcggggtttgcggcggtggtggggtga

SEQ ID NO: 7884 - protein, 325 aa, Pseudomonas syringae pv. tomato str. DC3000
MTELQPIPVTVLTGFLGAGKTTLLRHLLKAEHGLKIAVIENEFSDAGIDSQLLGTDPVQIMTLSNGCVCCTIHTDLTKALYLLLERLDSGEIAFDRLVIECTGLADPAPVAQTFFIDEELRERYILDGIITLVDAAHADTHLTQTIAQAQIGFADRLLVSKRDLVDDAAFDALSARLTRINRRAPIRIVEHGKIDLAELLDVRGFNLNADLGGSMTLRPLAPAGKSSDRITSLVLRSDKPLNLDRLSEFMNELLEDHGKQLLRYKGVLNIEDEPRKMVFQGVLKLYGFDWDTEWAEGELRESVIVFIADELPEEKIRAGFAAVVG

SEQ ID NO: 7885 - DNA, 1212 bp, Pseudomonas syringae pv. tomato str. DC3000
  CDS (1)..(1212): transl_table=11
atggcaaaccttctacctgttaccgtcctttccggttttctcggtgccggaaaaagcatcttactcaattacatactgcgcaatcgtgaaaacttgcgagttgcggtgatcgtcaatgatatgagcgagatcaacattgatggcggcgaagttcagcgcgatgtcagcctgaaccgcgccgaagaaaagctgatcgagatgagcaatggctgcatttgctgcaccctgcgcgaggatttgctcgaagaagtcagccgccttgcccaagacggtcgttttgattacttattgatcgaatccacgggtatttccgagccgttgccggtcgccgagaccttcacctttcgtgacgaggcaggcaagagcctgatggacctggcgcggctggacacgatggtcactgtggtcgacggggtgaatttcctgcttgattacgaagcggcagacggcttgtccacacgcggcgaaagcctcggcgaagatgatgaccgctcgatcactgacctgttgatcgaacagatcgagttcgccgacgtcatcctgctcagcaagattgacctgatcagctccagcgagcgcgaagagctgatggccattctgaaacgcctgaaccctgatgcgcagatcgtgccgatggtcatgggtcaggtgccgctggcgacaattctcaacaccggtcgttttgacttcgagcgtgcgtcccaggcccctggctggctgaaggaaatgcgcggtgaacatgcgccggaaaccgaggaatacggcatcgcctcgacggcttatcgtgctcgtcgcccctttcatccgcagcgcttcttcgatctcatcaatcgcccctggaccaacggcaaactgctgcgctccaagggtttcttctggctggccagcaagtacaaggacgcgggcagctggtcgcaggcgggcggcttgatgcgtcacggttttgccggacgctggtggcgcttcgtgacccgcgacagctggcctcaggacaaggaaagcgtcgcatcgattctggaaaactggtcgagcgaaaccggcgactgccgtcaggagctggtcttcatcgggcagaacatcgatttcacgctgctcacggccgaactggacaactgcctgctcaccgacgacgagatggctgcaggtgccgagcgctggcgccagctgtccgatccctttggcgaatggtatgaagacgaggtggctgcctga

SEQ ID NO: 7886 - protein, 403 aa, Pseudomonas syringae pv. tomato str. DC3000
MANLLPVTVLSGFLGAGKSILLNYILRNRENLRVAVIVNDMSEINIDGGEVQRDVSLNRAEEKLIEMSNGCICCTLREDLLEEVSRLAQDGRFDYLLIESTGISEPLPVAETFTFRDEAGKSLMDLARLDTMVTVVDGVNFLLDYEAADGLSTRGESLGEDDDRSITDLLIEQIEFADVILLSKIDLISSSEREELMAILKRLNPDAQIVPMVMGQVPLATILNTGRFDFERASQAPGWLKEMRGEHAPETEEYGIASTAYRARRPFHPQRFFDLINRPWTNGKLLRSKGFFWLASKYKDAGSWSQAGGLMRHGFAGRWWRFVTRDSWPQDKESVASILENWSSETGDCRQELVFIGQNIDFTLLTAELDNCLLTDDEMAAGAERWRQLSDPFGEWYEDEVAA

SEQ ID NO: 7887 - DNA, 957 bp, Salmonella enterica subsp. enterica serovar Typhi Ty2
  CDS (1)..(957): transl_table=11
atgaccccgattgcagttaccctacttaccggttttcttggtgccggcaaaaccaccctactacgccatatcctcaacgaacaacatggttttaaaatcgccgttatcgaaaacgaatttggcgaagtctccgttgacgatcaactgattggcgatcgcgccacacagatcaaaaccctgactaacggctgcatctgctgtacccgctccaacgagctggaagatgcgctattagacctgctcgacagccgcgaccgcggcgatattgctttcgaccgcctggtgattgaatgcaccggcatggccgaccccggcccgattattcagacctttttctaccatgacgtattatgcgaacgctacctgttagacggcgtgattgcgctggtcgacgcggtgcacgctaacgagcagatgaaccagttcaccatcgcccagtcgcagataggctacgccgaccgtatcctgctgaccaaaaccgacgtggcaggcgacagcgagaaactgcgcgagcggctggcgcgtatcaacgcccgcgccccggtttacaccgtggtacacggcgatattgacctgagtcagttgtttaataccagcggctttatgctggaagagaacgtgctggcaagccaaccgcgtttccactttattgccgataaacagaacgatgtgtcgtcaattgtggtggaactggattacccggtggatatcagcgaggtttcgcgggtgatggaaaacctgctgctggaatcagcggataaactgctgcgttacaaagggatgctgtggatcgacggcgaacccaaccgcctgctgttccagggcgtgcagcgtctctacagcgccgactgggacagaccgtggggcgacgaaacgccgcatagcacgctagtgtttatcgggatccagttgccggaagacgagatcagagcggcgtttgcggggttaaggaagtaa

SEQ ID NO: 7888 - protein, 318 aa, Salmonella enterica subsp. enterica serovar Typhi Ty2
MTPIAVTLLTGFLGAGKTTLLRHILNEQHGFKIAVIENEFGEVSVDDQLIGDRATQIKTLTNGCICCTRSNELEDALLDLLDSRDRGDIAFDRLVIECTGMADPGPIIQTFFYHDVLCERYLLDGVIALVDAVHANEQMNQFTIAQSQIGYADRILLTKTDVAGDSEKLRERLARINARAPVYTVVHGDIDLSQLFNTSGFMLEENVLASQPRFHFIADKQNDVSSIVVELDYPVDISEVSRVMENLLLESADKLLRYKGMLWIDGEPNRLLFQGVQRLYSADWDRPWGDETPHSTLVFIGIQLPEDEIRAAFAGLRK

SEQ ID NO: 7889 - DNA, 975 bp, Enterococcus faecalis V583
  CDS (1)..(975): transl_table=11
atgggcattccaatcaccattgtttctggctttttaggcgcaggaaaaacaaccttaattaaccatgcgcttgcgcaatcaccgtttcctaaagaagaaattattattattgaaaatgaatttggtcaaacaggcgttgaccacgcattacttttacaaaccacggaacgaattattcaattaaataacggttgcatgtgctgcagcttacgaggagatcttcttgcctctttatcagcaatcttagaagtgtatcaagaagaacaacaacccattgcccaagtcattttagaaacaacgggcattgctgatccgcaaccaatcattcaaacaattttaacgaccccgcacatcaaaaatcatttctatatagacagtctcttaacggtcgttgatgggcatcattggcaacaacagcttcaagaagccgaagccatcaaacaactggccttagcagatcgcctctttttttctgtcaaggaaccagcagacagcactcagctaccaacgttccaagaaacccttcgtaccattaatccttttgctgatattttatcctttcaagccaacgagcctcttttggctagtgacttttttcaattaaataagtttacggcaacacttacagaacacgaaatgactcattccccgcatgagcacgcccacgagcatcatcaccatacctttcactccctcacgctaacggcgtcctcagccatcaacgaacctcttttcactcgttggcttgattggttaatgtatacgcatcaggaaaagttataccgtttcaaagggattctcgccttacaggagcatgacttggccattgccatgcaaggcgtcaaccagcaagtggcctttcaaatgacgaatcaaccccctcaagaaacgacaattgttctgattggcaaagaattagagacaaaaaaaattcaagaaacctttcaaaccctcaacaaaatagctactccgtaa

SEQ ID NO: 7890 - protein, 324 aa, Enterococcus faecalis V583
MGIPITIVSGFLGAGKTTLINHALAQSPFPKEEIIIIENEFGQTGVDHALLLQTTERIIQLNNGCMCCSLRGDLLASLSAILEVYQEEQQPIAQVILETTGIADPQPIIQTILTTPHIKNHFYIDSLLTVVDGHHWQQQLQEAEAIKQLALADRLFFSVKEPADSTQLPTFQETLRTINPFADILSFQANEPLLASDFFQLNKFTATLTEHEMTHSPHEHAHEHHHHTFHSLTLTASSAINEPLFTRWLDWLMYTHQEKLYRFKGILALQEHDLAIAMQGVNQQVAFQMTNQPPQETTIVLIGKELETKKIQETFQTLNKIATP

SEQ ID NO: 7891 - DNA, 1188 bp, Bacillus cereus ATCC 14579
  CDS (1)..(1188): transl_table=11
atgaaaaaagtacctatcactgtattaagtggttttttaggatctggaaaaactaccttactacatcacattttgactaataagaataacttaaaagtagctgttatcgttaatgatatgagcgaagtaaacattgatgcatctcttataaaaaagggtggtttttcacgtacggaggaaaaactagtagaaattcaaaatggctgtatttgttgtacactacgagaagatttaatgatagaagtgaatcgtcttgtggaaaatggtgatattgactatattattattgaatcttctggtataagtgagcctattccagttgctcaaacgtttacttatacagacgaagttcttaacattgatttaacgaaaaattgtcgcctcgatacgatggttacagttgtagatgcaaacagattttgggatgattttgcagatggagaaagtttattagaccgaaaacaagcaatcgatgagaatgatacccgggaagttattgatttattaatagatcaaattgagtttgcaaacgtaatcattcttaataagatagatttgctagaaaaagaagatgtgatagagcttcatcatttactaaaaaaattaaatcctaatgcaaaagttcttgaatcttcgtttagcaaagtaccattacaagaaattttaaacacaaatctatttaattatgaagaagccagtcaatcggccggctggatacaagaattaaatagtgactatcatacaccggaaacggaagaatacggtatcaattcctttgtttaccgccgcaaatatcctttccatcccgagcgccttatgaattggctagaaaaatggcctttagatgttgtaagagcgaaaggattcttctggctggcatctcgtaataatatgatagggcttctatctcaagcaggttcctctattacaattcaaggagccggtgaatggatagccgcattacctgaaactgaaagaaatcaaatgattgcagaagaaccagaagtattaaaaaactgggacgagcgatatggagatcgaataactgagctcgtatttatcggtattgatatgaatcgttctgtgattgaacaatcattagatgattgtctattaacagaaaaggaaatgggacaaaagtggaatacatttattgatcctattccggcttttacttatacttcataa

SEQ ID NO: 7892 - protein, 395 aa, Bacillus cereus ATCC 14579
MKKVPITVLSGFLGSGKTTLLHHILTNKNNLKVAVIVNDMSEVNIDASLIKKGGFSRTEEKLVEIQNGCICCTLREDLMIEVNRLVENGDIDYIIIESSGISEPIPVAQTFTYTDEVLNIDLTKNCRLDTMVTVVDANRFWDDFADGESLLDRKQAIDENDTREVIDLLIDQIEFANVIILNKIDLLEKEDVIELHHLLKKLNPNAKVLESSFSKVPLQEILNTNLFNYEEASQSAGWIQELNSDYHTPETEEYGINSFVYRRKYPFHPERLMNWLEKWPLDVVRAKGFFWLASRNNMIGLLSQAGSSITIQGAGEWIAALPETERNQMIAEEPEVLKNWDERYGDRITELVFIGIDMNRSVIEQSLDDCLLTEKEMGQKWNTFIDPIPAFTYTS

SEQ ID NO: 7893 - DNA, 915 bp, Bacillus cereus ATCC 14579
  CDS (1)..(915): transl_table=11
gtggagattcatatattaggtggttttttaggtagtggaaaatcaacattattacaaaatttattgttagcagagaaaaagaagaatagaaaagttgcagtattaatgaatgaaattggtgaatactcagtagatacagatattattggaaaagagaatgttttaagagaacttcttaaaggatgtatttgttgtacgttaaaagaagagcttgaaatacaattacattcgttataccaacaagaaagaccagatgtaatttatatagaaacgacaggtgttgcgcatccaattgaagtgttagacgcgtgtgtctcgccaattttagctccttttctggaagtgaaatcaattgtagtcgttttagatgcagtaaggtggttaaatcgaagtatattaagtgcaaatgtacaacagctattgcatgagcaactgaaatttggtagtcacattcttgttaataaagcagatttactaacagatgaagataagaatacagtatttgaagaagtaaaggcaataaatgatcatgcgaaaatgtatgagacaaagtattgtaatatatctttaaaagatatagaagaagcagaatttccaaatgatgaggaacacgagacactacatgtcaaacagcatttacatatacaaacaatgacatatcaatttacgaaaccgattgatcaagacaaattatatgaatggctttcgaatttaccagatagtatttatcgagtgaaaggttttgtgaaattccatggagataaataccctcacctattccaatattcgttcggagtaccaactttattagaacaagacttcggtttcccgacaaacttagtagtaataggagaaggactagataagaaacaattggctgaagggttagagaaagtagaacttaactctaattaa

SEQ ID NO: 7894 - protein, 304 aa, Bacillus cereus ATCC 14579
MEIHILGGFLGSGKSTLLQNLLLAEKKKNRKVAVLMNEIGEYSVDTDIIGKENVLRELLKGCICCTLKEELEIQLHSLYQQERPDVIYIETTGVAHPIEVLDACVSPILAPFLEVKSIVVVLDAVRWLNRSILSANVQQLLHEQLKFGSHILVNKADLLTDEDKNTVFEEVKAINDHAKMYETKYCNISLKDIEEAEFPNDEEHETLHVKQHLHIQTMTYQFTKPIDQDKLYEWLSNLPDSIYRVKGFVKFHGDKYPHLFQYSFGVPTLLEQDFGFPTNLVVIGEGLDKKQLAEGLEKVELNSN

SEQ ID NO: 7895 - DNA, 960 bp, Bacillus cereus ATCC 14579
  CDS (1)..(960): transl_table=11
atgtacgaaatgattccagtaacaatattaactggttttcttggatcggggaaaacgacattattaaatcgtattttatcagaaaatcacggtaagaaattagcggtgattgtaaatgaaatagggcaaattggcattgataatcagttgattatgaatgtggaagaagaaattatggaaatgacaaatggctgtttatgctgtactgtacgtgaagacttacttgttgctttaaaacagttattggacgtaaaagcagaagggaaaatggattttgatggtttagtaattgaaacgactggccttgcaaatccaggcccgattattcaaacattctttttagatccagtcatccaatctgcttaccaaattaacggtgttgtaacggtggtagatagttatcatatacataaacattttgaaaaaggattagaagcaaaagagcaaattgcgtttgctgatgttgttttagtaaataaattagatttaattgaagagaatgagaaagaaaatctcttgcatgaaattcaaggaattaacccgactgcaaagttaattgaggcgactaactgtgaggtagatataccatctttattacaaatccaaacgtttaaaacgaaagatacgttgcaaatttaccctcataaagaacataaccacttagaaggtgtgaaatcatttgtattacgtgaagaacgtccgctggatttacaaaagcttaatgagtggatgtcagctgtcgtgcaagagctaggggaatatttatatcgttacaaaggaattttatcgatagacggagtagataaacgtatcgttttccaaggtgtacatacgttatttgctgcttcgtacgatagagagtggcaagagggcgaagagcgagtaagtgaagtagtttttatcggaagagatattaataaagagtggttccaagaacatttcgaggagtgtgtgaaataa

SEQ ID NO: 7896 - protein, 319 aa, Bacillus cereus ATCC 14579
MYEMIPVTILTGFLGSGKTTLLNRILSENHGKKLAVIVNEIGQIGIDNQLIMNVEEEIMEMTNGCLCCTVREDLLVALKQLLDVKAEGKMDFDGLVIETTGLANPGPIIQTFFLDPVIQSAYQINGVVTVVDSYHIHKHFEKGLEAKEQIAFADVVLVNKLDLIEENEKENLLHEIQGINPTAKLIEATNCEVDIPSLLQIQTFKTKDTLQIYPHKEHNHLEGVKSFVLREERPLDLQKLNEWMSAVVQELGEYLYRYKGILSIDGVDKRIVFQGVHTLFAASYDREWQEGEERVSEVVFIGRDINKEWFQEHFEECVK

SEQ ID NO: 7897 - DNA, 1296 bp, Rhodopirellula baltica SH 1
  CDS (1)..(1296): transl_table=11
atgaaccaaaccgattccaaaacgccccaagctgaacgtcttcctgttaccgtgctttccggattcctcggagccggcaagacgacactgctcaaccacatcctgatcaatcgagacggattgcgagtcgcggtgatcgtcaacgacatgagcgaagtcaacatcgacgcggcgctggtcaaatcgggcgacgcgaatctatctcgcaccgaggaacagctcgtcgagatgtccaacggctgcatctgctgcacgcttcgcgaagacttgctcatcgaagttcgccgattggctcgcgatggccgctttgattatctgctgatcgaatccactggtatctccgaaccgatgccggtcgcggaaaccttcactttcgaagacgaagagggtgatagtctgtcgctggtcgcggaactggacacgatggtgaccgtggtcgacgcgggaaatttcatgaaagacttcggctcctgggatgatctcaccgaccgacggttgggtttgagcgaagaggacactcgcaacattgtggacttgttggtcgatcaagttgaattcgccaacgtcatccttgtcaacaaaaccgatttgatctcgccgtatgaactggagcagctcacacggattctgcgtcaactcaacgctgaatccaaaattctgaccacgacggaaagccgtgttgagctatccgaaatcatgggcaccgggctctattctctgagtgaagccgagacgcagccagggtggttggaggtgcctcgtggggaagaggaaaccgagaccgaagaatacggcatctcgaatttcgtttatcgagcccatcgcccattccatcccaagcggttgacgaacgctctggatgctgacatggaagaaggcttgttcaccggagtgcttcgcagcaaaggattgatgtggatcgcgtcgcgtcacgactgggcctacgactggtcacaagccggttgctcgatccgcatgaacccagccggtttctggtgggcggccgcaccggaaaacgaatggccggatgattccgagtccattgcagagattcgatcgaaattcgtcggcgaacacggcgatcgccatcaagaattggtcttcatcggaaacgcgatgagccaagaacgaattacccagattctcgatgactgcttgctgactgacatggagtttgctcaaggcccggaagcctggacgaacatggaagatccattgccgccgattgaactggaaacggacctcgacgaaatgctcgcttcagatgaagcaactgcacatgaggttctgcagtga

SEQ ID NO: 7898 - protein, 431 aa, Rhodopirellula baltica SH 1
MNQTDSKTPQAERLPVTVLSGFLGAGKTTLLNHILINRDGLRVAVIVNDMSEVNIDAALVKSGDANLSRTEEQLVEMSNGCICCTLREDLLIEVRRLARDGRFDYLLIESTGISEPMPVAETFTFEDEEGDSLSLVAELDTMVTVVDAGNFMKDFGSWDDLTDRRLGLSEEDTRNIVDLLVDQVEFANVILVNKTDLISPYELEQLTRILRQLNAESKILTTTESRVELSEIMGTGLYSLSEAETQPGWLEVPRGEEETETEEYGISNFVYRAHRPFHPKRLTNALDADMEEGLFTGVLRSKGLMWIASRHDWAYDWSQAGCSIRMNPAGFWWAAAPENEWPDDSESIAEIRSKFVGEHGDRHQELVFIGNAMSQERITQILDDCLLTDMEFAQGPEAWTNMEDPLPPIELETDLDEMLASDEATAHEVLQ

SEQ ID NO: 7899 - DNA, 1014 bp, Rhodopirellula baltica SH 1
  CDS (1)..(1014): transl_table=11
ttgacgatgccaataccaaccaatttgatcaccgggttccttgggtcagggaagacgaccgcgatcaatcgtttgctcacgcatcgacctgacggtgagcgatggtcgatctttgtcaacgaatacggcatggtgactgtggacgagatgctgatcgactcggagtcaccggaggttagcgtgcaggaactcggtggcggttgcttgtgctgcaccgtcgcgtttgcttttgatgcagtcttcagtcaattcattcgtcgcagcaaaccagaccggttgttcttggaacccagcggcgcggggcatccagcggccttgatcgacaagttgagggacgagaactttcgtcgagcgatcgatcttcgggcaacaatttgtttggttgatcctgaagattggagcaaaccgcagtggcgggattccgaggtctttcatgaccaggttcaaatggccgatgtcgtcgcgatcaacttcaccgacaagcgagaccccgagttgacgcagcaatgccgtgaatggattgaatcattcgacccgcccaagatgctgattgttgaaacggaccatgggcgaatcgatcccgcgtggctcgatatccaaaacacggttgtccgcccacccaagtttggcgaggctcattcgcacaatcattcctatgcggccgggcatgtggatgcgggcgggctgacttcgattgaggccccgccgatgttgggaaagcccaaacggattgaaaacgagggcgacgggcagtgggcgtgcgggtggatcttttccgtcgatgaagtttttgatcgggatcagttgctggacctacttggctatctgcagccggtcgtgcggctcaaaggcgtgtttcggtgccaggatgattggtgggtgatcaatcgcagcaagaatgagacctcattcagcaccacggcgtatcgtcgcgacagccgattggaagtcatcactgacagagcgacctcgggctgggacgaagtggaacagctgctactgaagtgcaagtag

SEQ ID NO: 7900 - protein, 337 aa, Rhodopirellula baltica SH 1
MTMPIPTNLITGFLGSGKTTAINRLLTHRPDGERWSIFVNEYGMVTVDEMLIDSESPEVSVQELGGGCLCCTVAFAFDAVFSQFIRRSKPDRLFLEPSGAGHPAALIDKLRDENFRRAIDLRATICLVDPEDWSKPQWRDSEVFHDQVQMADVVAINFTDKRDPELTQQCREWIESFDPPKMLIVETDHGRIDPAWLDIQNTVVRPPKFGEAHSHNHSYAAGHVDAGGLTSIEAPPMLGKPKRIENEGDGQWACGWIFSVDEVFDRDQLLDLLGYLQPVVRLKGVFRCQDDWWVINRSKNETSFSTTAYRRDSRLEVITDRATSGWDEVEQLLLKCK

SEQ ID NO: 7901 - DNA, 1077 bp, Prochlorococcus marinus subsp. marinus str. CCMP1375
  CDS (1)..(1077): transl_table=11
atgactattgattcagaagttactcaaatttccaaagaagcatcaactgtacctgttacaattctaacgggttttctagggtccggcaaaacaactctacttaaccacattttacaaaatcaggaaggtctaaaaacagccgtattagtaaatgagtttggcgaaatagggatagataatgatcttattatacgcactggtgaagaaatgattgaattaagcaatggctgtatttgttgctctataaatggagaattagttaatgcagttgaaaaaataattacacaagataaatcaatagattacattattgttgagacaactgggcttgcagatcctctgccagttgctatgacatttcttgggaatgaattaagagaagccactcgtcttgattcaattattacacttatagatgcagaaaacttcaatgatggcctattaggaagtgaaattgcaagatcccaactaatccatggagacatcttacttataaataaatgtgatcttgtaaatgaagaaaaattatcttacatagaaaaagaactttttactataaaaaatgatcctagaatcttaaaaacgaaacaagcagaagctcctcttgctctcttgctaagtgtaggcctttttgagtcagacaaactacataatgagccaatggaagatcacagtaaatgtgaccatgaacatggactatgtaaacatgatgatcttcatcaagagcataatcacacaacctcagagcaaagcaatattgaaggctatacatcactttcatttaaagaaaaagcgccattttctcttagaaaatttcaaaattttctagacaatcaattaccatcatccgtttttcgagcaaaaggaatactttggtttacagagagtgataagcgttatatatttcatcttgcaggtaaaaggttctcaattgatgattctgaatggaatggtgaaaaaacaaacaaattagttctcattggtaaagatctcgatcatgaaaaaataaaccatcaactaaatgcctgcgtctccaaagattcaggacaaggttttggagaaagtaatattgtctaa

SEQ ID NO: 7902 - protein, 358 aa, Prochlorococcus marinus subsp. marinus str. CCMP1375
MTIDSEVTQISKEASTVPVTILTGFLGSGKTTLLNHILQNQEGLKTAVLVNEFGEIGIDNDLIIRTGEEMIELSNGCICCSINGELVNAVEKIITQDKSIDYIIVETTGLADPLPVAMTFLGNELREATRLDSIITLIDAENFNDGLLGSEIARSQLIHGDILLINKCDLVNEEKLSYIEKELFTIKNDPRILKTKQAEAPLALLLSVGLFESDKLHNEPMEDHSKCDHEHGLCKHDDLHQEHNHTTSEQSNIEGYTSLSFKEKAPFSLRKFQNFLDNQLPSSVFRAKGILWFTESDKRYIFHLAGKRFSIDDSEWNGEKTNKLVLIGKDLDHEKINHQLNACVSKDSGQGFGESNIV

SEQ ID NO: 7903 - DNA, 1074 bp, Prochlorococcus marinus subsp. marinus str. CCMP1375
  CDS (1)..(1074): transl_table=11
atgtctagtcgtataccagtcactgtaattacaggcttcctaggtgctggtaagactactcttttgcgcaatcttcttaaaaatagtaatcaacgtttagctgtaatagttaatgaatttgggagtgttggtttagatggtgatctcattcgcagttgtggattttgtccagaagatgatatggaaggcaggcttgttgaattaaataatggatgcttatgctgcaccgttcaagatgatttcttgcctactatggagaaattattatctcgttctgaaagcttggatggaatcgtaattgaaacaagcggccttgctttgcctaagcctcttcttcaggctattgaatggccacaaattagatcaaaagtttttattaatggagttgtaactttagtagatagtcaagctttatctcttggtagtccagtaggagacgttaaggctctagaagaacaacgtaagctagatgaaagtattgatcatattacgccaattaaagatcttttctctgatcaacttacttgtgcggatcttgttttattaagtagatcggatttggtggattccaatgtagttgaatcaataaaaattgatatttctagcggattaagagaggggacagctattcttccaatctcttatggtgaaataaacccttctttaattcttgggcttcgaaacgataaggattcacatagctcatttttctcaaataaaatttcatctaaacatgaacatgaacatgaacatgaacatgaacatgaacatttagaggtcattagtacttctatttgttttgaagcaaatattactcaatcagaaataaagaatgtgctaatgcctttggttcaaaattttcaaattctaaggcttaagggacgtttttggctccctgacaaacctttacctcttcaggttcaaatggttggcccaagaatgtctacttggtttgaaaaagctcctgaagatgtttggaggccagagcaaggaggtcttgaactggtagctctatctcttaaagaaggacttgaaaatgaaattcaattgggttttaataaaaggttttcttaa

SEQ ID NO: 7904 - protein, 357 aa, Prochlorococcus marinus subsp. marinus str. CCMP1375
MSSRIPVTVITGFLGAGKTTLLRNLLKNSNQRLAVIVNEFGSVGLDGDLIRSCGFCPEDDMEGRLVELNNGCLCCTVQDDFLPTMEKLLSRSESLDGIVIETSGLALPKPLLQAIEWPQIRSKVFINGVVTLVDSQALSLGSPVGDVKALEEQRKLDESIDHITPIKDLFSDQLTCADLVLLSRSDLVDSNVVESIKIDISSGLREGTAILPISYGEINPSLILGLRNDKDSHSSFFSNKISSKHEHEHEHEHEHEHLEVISTSICFEANITQSEIKNVLMPLVQNFQILRLKGRFWLPDKPLPLQVQMVGPRMSTWFEKAPEDVWRPEQGGLELVALSLKEGLENEIQLGFNKRFS

SEQ ID NO: 7905 - DNA, 1383 bp, Prochlorococcus marinus subsp. marinus str. CCMP1375
  CDS (1)..(1383): transl_table=11
atgactatcggacaaaaagtacctgtcaccatccttacgggcttcctcggctctgggaaaacgactctccttaatcgaattctgagtgaagaacacggtaaacgaatcgctgtaatcgaaaacgaatatggtgaagtaggtattgatcagggtctggtcattaatgctgacgaagaagtctttgaaatgtccaacggttgcatttgttgcaccgttcgtggagacctgattcgcgtattgggcaatctcatgaagcgacgagataaattcgactatgtgttggttgagacaacaggacttgctgatcctggccctgttgctcagacattttttatggatgacgaaatccgtaatgaattttctcttgatggcattgttactctcgttgatgcggctcatattgatcagcaactcggtcgcagtgatgaaagttctgagcaggttgccttcgcagatgttcttgtcctaaataaaacggacttagtttctgatgaatctcttgatattcttgaatcacggctacgagatatgaatcgtatggctcgtgttgtgcgtagtaagcaagcggaggtgtctattgatactgtgctaaaccttagtgcttttgatctagatcaggtgttaaagcgtcgccccacttttcttgagccagaatatccattcgagtggacaggtgtcttttctcttgagaaaggtcgttatgaacttagccttgaagaaggtcctgatcccactatgtcactcgtagttctgggagatcaggggattgacgaagcggctcttaatgctggtgcggagtcttgcgtaagactttacgctgactctgcgaaacttcttcatccgggaagcacagtcccaattgaaaaacatgtcagtcttcagcttcagtctaatgggcgtaagtctttctttttagaactagataaccctactcatattgggctgttcacccagcacacagcagaggaatttgatatcaaagtatcccgagttgatactttaatttctacaattgaaagtaatggcaaaatcgaggctttggtccaacctgaaactgagcggacttgggtagcagagcatgaacatgatgatgaagtgggctcaattgctatcgagcgactaggtgatgtcgatccagaaaaactcaataagtggttgagtcgactcctatcagaaaaaggtgtagatatatttaggacaaaaggatttataagttatgcgggcgaatccaggcgaatggtttttcaaggggttcacatgctcttcactgctcagccagataaagagtggggaagtgaacctcgccgcaatcaattggtgtttatcggcagaaatcttgatgaagaagaaatgtctcgagagtttgataaatgcctggtgtag

SEQ ID NO: 7906 - protein, 460 aa, Prochlorococcus marinus subsp. marinus str. CCMP1375
MTIGQKVPVTILTGFLGSGKTTLLNRILSEEHGKRIAVIENEYGEVGIDQGLVINADEEVFEMSNGCICCTVRGDLIRVLGNLMKRRDKFDYVLVETTGLADPGPVAQTFFMDDEIRNEFSLDGIVTLVDAAHIDQQLGRSDESSEQVAFADVLVLNKTDLVSDESLDILESRLRDMNRMARVVRSKQAEVSIDTVLNLSAFDLDQVLKRRPTFLEPEYPFEWTGVFSLEKGRYELSLEEGPDPTMSLVVLGDQGIDEAALNAGAESCVRLYADSAKLLHPGSTVPIEKHVSLQLQSNGRKSFFLELDNPTHIGLFTQHTAEEFDIKVSRVDTLISTIESNGKIEALVQPETERTWVAEHEHDDEVGSIAIERLGDVDPEKLNKWLSRLLSEKGVDIFRTKGFISYAGESRRMVFQGVHMLFTAQPDKEWGSEPRRNQLVFIGRNLDEEEMSREFDKCLV

SEQ ID NO: 7907 - DNA, 1089 bp, Prochlorococcus marinus subsp. marinus str. CCMP1375
  CDS (1)..(1089): transl_table=11
atgaatgaaacgtcgaatattccagtgacaattattaccggatttcttggatcaggtaaaacaacacttttgaatcatattttaactaatcaaggtgaattaaaaaccgcaattctagttaatgaatttggagaaataggtattgataatgacttaattgtaaaaacagatcaaggtattgttgaactaaacaatggttgtatatgttgtacaatcaatggagaattaatgagcactataaataagatattagaaagcaataaaactatagagtacttgataattgaaaccactggactagcagaccctttaccagtagcaatgactattaatagtgccacagaaagattgagattagattcaataattacattaattgatgctgaaaacttttgtgatgaaaatttatctagccaaattgcaagatctcaaataatatatggtgatatattgataatcaataaatgtgatcttgtaagcgaagagaagatatcatttattaagcgtaaagtttcagaaataaaaaaccagccaagaatattaagaagcatcaaaggcaatgtacctttgggcctatttttaagtgttggcctattccaatcagatttgttagcaaaagatagtagcgcccataaccataaccataaccataaccataaccataaccataaccataaccataaccataaccataaccataaccataaccataaccataaccataaccataaccatgagcatgagcatgagcatgagcatgagcatgagcatgatgaatcatcgattgagggatttacttcattgtcatttcaatctgaattgcctttctcattgagaaaattccaaaatttcttagacaatcaattaccatctactgtatatagagcgaaaggtttactttgctttgaagaaagtgaattaactcatatatttcatttatcaggcaaaagatttacactggatgatactaaaagacatcgtaaaagagaaaataaaattgtgcttatagggaaaaatcttcaacacaatgagctatacaatcaactgcaagcatgtatttcatatacgcataagaataaagttcattaa

SEQ ID NO: 7908 - protein, 362 aa, Prochlorococcus marinus subsp. marinus str. CCMP1375
MNETSNIPVTIITGFLGSGKTTLLNHILTNQGELKTAILVNEFGEIGIDNDLIVKTDQGIVELNNGCICCTINGELMSTINKILESNKTIEYLIIETTGLADPLPVAMTINSATERLRLDSIITLIDAENFCDENLSSQIARSQIIYGDILIINKCDLVSEEKISFIKRKVSEIKNQPRILRSIKGNVPLGLFLSVGLFQSDLLAKDSSAHNHNHNHNHNHNHNHNHNHNHNHNHNHNHNHNHNHEHEHEHEHEHEHDESSIEGFTSLSFQSELPFSLRKFQNFLDNQLPSTVYRAKGLLCFEESELTHIFHLSGKRFTLDDTKRHRKRENKIVLIGKNLQHNELYNQLQACISYTHKNKVH

SEQ ID NO: 7909 - DNA, 1005 bp, Bordetella pertussis Tohama I
  CDS (1)..(1005): transl_table=11
atggatgcgttcaagcaagacagccgcatcggcgtgacggtgttgaccggattcctgggcagcggcaagacgacgctgctcaatcgtctggtgcaggagcccgagtacgccgaggcggtggtcatcgtcaacgagttcggcgacataggcgtggaccaccatctggtacgcaatgtcgatgaccgtatcgtgctgctggagggcggatgcatatgctgcaccgccagcggcggcctggtcgatacgctgcgcgacctgttcatgctggtggtgcgccgccgcatcaagccgttcaagcgggtgctgctggagacgaccggcctggccgggcccgcctcggtcatgttctcgctgcgccacgatccgttcctggccgagcgctacgcgtatcacggcgcgatcgccatggtcgatgcgcaacacgtgcgcgaacagctgatggtgcagcccgaggcggcccagcagatcgcgctggcggacctggtcgtgttcagcaaggcggacctggccggccaggtgcaactggccagcgccatgcgcgatgtggcgcgcgccaatccgggcgtgcccatgtgcgtggtgcgccgcggcgagccgctggatgagcggctgcacggcgacttcctggtgcgcgagcgccggcaggcggcgcccctggggcgctggctgggcgcctttgccgcgccgccgggcggcccgcaccccaatgtggcgcatttttccctgaacctgtcggtgccgctgacgcgcggcatgttcctggcccggatgtcggaaatccaggcggcctatgaccgcggcatcctgcgcatcaaggggctggtatgtttcgaggccgaagccttgccctgggcggtgcacggggtgcatcggcagctgtatccgctggaggcgttgccgcaatggccgggtgacgaccgccagtcgcgcctggtgttcatcctgcgcggcctggaccgggacgcggtccaggccgatgtcgccaggcggctgcagcaggggtga

SEQ ID NO: 7910 - protein, 334 aa, Bordetella pertussis Tohama I
MDAFKQDSRIGVTVLTGFLGSGKTTLLNRLVQEPEYAEAVVIVNEFGDIGVDHHLVRNVDDRIVLLEGGCICCTASGGLVDTLRDLFMLVVRRRIKPFKRVLLETTGLAGPASVMFSLRHDPFLAERYAYHGAIAMVDAQHVREQLMVQPEAAQQIALADLVVFSKADLAGQVQLASAMRDVARANPGVPMCVVRRGEPLDERLHGDFLVRERRQAAPLGRWLGAFAAPPGGPHPNVAHFSLNLSVPLTRGMFLARMSEIQAAYDRGILRIKGLVCFEAEALPWAVHGVHRQLYPLEALPQWPGDDRQSRLVFILRGLDRDAVQADVARRLQQG

SEQ ID NO: 7911 - DNA, 1116 bp, Bordetella pertussis Tohama I
  CDS (1)..(1116): transl_table=11
atgaacaccgcgcgcagtctggacaaaatggttcccgtcacgatcctcaccggctttctcggtgcgggcaagaccaccctgctcaagcgcatcctgaccgaataccacggccggcgcgtggcggtgatcgaaaacgaattcgggcccgagagcatcgacaacgacctgctggtgcaggatcgcgacgaagaaatcatcgagctgtccaacggctgtgtctgctgcaccgtgcgcggcgacctgatgcgcacgctgtcggacctgcgcgccaggcgcgaagcgggcgaactgtcgttcgagcgcgtcatcatcgagaccaccggcatggccaaccccggcccggtgtgccagaccttcttcatggacgacgacatcgccgagtactaccgcctggacgcggtggtgacggtggtcgacgccaagcatggcatggcgaccctggacgcccaggaagaagcccagaagcaggtgggcttcgccgaccgcatcctggtttccaagaaagacctggtcaacgacgtcgactacgcggcgctgcaccagcgcctggtgcgcatcaacccgcgcgcgccgatcacgccggtgcatttcggcgaagccgacctcaagtccatcatcgacatcagcggcttcaacctgaactcgatcctggacatcgacccggccttcctggccgacgagcaccccgacgccgcccacgaccatcatgaccacgaccatggccacggccatgatcacgatcatgatcatgatcacgaaggcgaatgcggggcccattgcaaccatcaccaccatcatcaccacgcccaccacgatgacgaaatcggcgcgttcgtgtttcgctcgaacaagcccttcgatccagcccggctggaagaattcctgggcggcgtggtgcaggtctatggtcccgacctgctgcgctacaagggcatcctgtacatgaagggcatcaaccgccgcatgttgttccagggtgtgcacatgatgatgggcgccgaacccggcaaagcatggaccgcggccgaaaagccatccaccaagatggtgttcatcggccgcaagctgccccaggagattttcacccggggtcttgagcagtgcctggtcggataa

SEQ ID NO: 7912 - protein, 371 aa, Bordetella pertussis Tohama I
MNTARSLDKMVPVTILTGFLGAGKTTLLKRILTEYHGRRVAVIENEFGPESIDNDLLVQDRDEEIIELSNGCVCCTVRGDLMRTLSDLRARREAGELSFERVIIETTGMANPGPVCQTFFMDDDIAEYYRLDAVVTVVDAKHGMATLDAQEEAQKQVGFADRILVSKKDLVNDVDYAALHQRLVRINPRAPITPVHFGEADLKSIIDISGFNLNSILDIDPAFLADEHPDAAHDHHDHDHGHGHDHDHDHDHEGECGAHCNHHHHHHHAHHDDEIGAFVFRSNKPFDPARLEEFLGGVVQVYGPDLLRYKGILYMKGINRRMLFQGVHMMMGAEPGKAWTAAEKPSTKMVFIGRKLPQEIFTRGLEQCLVG

SEQ ID NO: 7913 - DNA, 1110 bp, Bordetella parapertussis 12822
  CDS (1)..(1110): transl_table=11
atgaacaccgcgcgcagtctggacaaaatggttcccgtcacgatcctcaccggctttctcggcgcgggcaagaccaccctgctcaagcgcatcctgaccgaataccacggccggcgcgtggcggtgatcgaaaacgaattcgggcccgagagcatcgacaacgacctgctggtgcaggatcgcgacgaagaaatcatcgagctgtccaacggctgtgtctgctgcaccgtgcgcggcgacctgatgcgcacgctgtcggacctgcgcgccaggcgcgaagcgggcgaactgtcgttcgagcgcgtcatcatcgagaccaccggcatggccaaccccggcccggtgtgccagaccttcttcatggacgacgatatcgccgagtactaccgcctggacgcggtggtgacggtggtcgacgccaagcatggcatggcgaccctggacgcccaggacgaagcccagaagcaggtgggcttcgccgaccgcatcctggtttccaagaaagacctggtcaacgacgtcgactacgcagcgctgcaccagcgcctggtgcgcatcaacccgcgcgcgcccatcacgccggtgcatttcggcgaagccgacctcaagtccatcatcgacatcagcggcttcaacctgaactcgatcctggacatcgacccggccttcctggccgacgagcaccccgacgccgcccacgaccatcatgaccacgaccatggccacagccatgagcacgatcatgatcacgaaggcgagtgcggggcccattgcaaccatcaccaccatcatcaccacgcccaccacgatgacgaaatcggcgcgttcgtgtttcgctcgaacaagcccttcgatccagcccggctggaagaattcctgggcggcgtggtgcaggtctatggtcccgacctgctgcgctacaagggcatcctgtacatgaagggcatcaaccgccgcatgttgttccagggtgtgcacatgatgatgggcgccgaacccggcaaagcatggaccgcggccgaaaagccatccaccaagatggtgttcatcggccgcaagctgccccaggagattttcacccggggtcttgagcagtgcctggtcggataa

SEQ ID NO: 7914 - protein, 369 aa, Bordetella parapertussis 12822
MNTARSLDKMVPVTILTGFLGAGKTTLLKRILTEYHGRRVAVIENEFGPESIDNDLLVQDRDEEIIELSNGCVCCTVRGDLMRTLSDLRARREAGELSFERVIIETTGMANPGPVCQTFFMDDDIAEYYRLDAVVTVVDAKHGMATLDAQDEAQKQVGFADRILVSKKDLVNDVDYAALHQRLVRINPRAPITPVHFGEADLKSIIDISGFNLNSILDIDPAFLADEHPDAAHDHHDHDHGHSHEHDHDHEGECGAHCNHHHHHHHAHHDDEIGAFVFRSNKPFDPARLEEFLGGVVQVYGPDLLRYKGILYMKGINRRMLFQGVHMMMGAEPGKAWTAAEKPSTKMVFIGRKLPQEIFTRGLEQCLVG

SEQ ID NO: 7915 - DNA, 1011 bp, Bordetella parapertussis 12822
  CDS (1)..(1011): transl_table=11
atgacagccccgggcagcgtgcccctgacggtgatcgggggcttttggggcgccggcaagaccactttgctcaactaccttctgaaggtccagcatagcgagcgtgtgctcgtcatggtcaatgacttcggctcgatcaatatcgacgcggaactcctggatcagggccggcatgaccgccccggcgtagtccgcctgcagaacggctgcgtctgctgctccattggcggagacttgatgcaggcattcctgcaagtgatgtcaatgcccgacaggccagaccgcatcatcgtcgaagcgagcggcgttgccgaccccacccggatcgcgcagataggccgggtaagcggcggactcagcgatgaaggcgtgattacgctcgtggatgcgtcggcggtgagagcccttgctgccgacaagtatgtcggcgatatcgtccgccagcagattctgagcgcggacattgtgctgctcaacaagctggatctctccagcgacgccgaaatcgtcgagaccagggcatggctgcgcgaccttgcgccgcgcacgcgcgtggtttcctgtatccacggcgaagtcgatgcggtctcggtcctgggtatcggcgccggcaaggttgcgccggacaccgccggcggccctgtcgatgtccccgtgcccgatctgcgccgcgcttcgacgcggcacgccgatacgttccatagctcgacgcttgcaacggagcatcgcttcgatcggcgcaggatcgagtatgccctcgacgcgcttccgcagacggttttgcgaggcaagggatttgtggagctcgaaggcgaggcaacgcccgcattgctgcagctttgcggaagcagatggaccctggacccagtttccacaccggctccgcctgccggcacacatctcgttttcatcgcgacagggggcaggggcgtgccacggttcgatgccccgtcgcacttcgagcaggcgttggcatcgcgtgacgccgcttccgcggacacaagcaattga

SEQ ID NO: 7916 - protein, 336 aa, Bordetella parapertussis 12822
MTAPGSVPLTVIGGFWGAGKTTLLNYLLKVQHSERVLVMVNDFGSINIDAELLDQGRHDRPGVVRLQNGCVCCSIGGDLMQAFLQVMSMPDRPDRIIVEASGVADPTRIAQIGRVSGGLSDEGVITLVDASAVRALAADKYVGDIVRQQILSADIVLLNKLDLSSDAEIVETRAWLRDLAPRTRVVSCIHGEVDAVSVLGIGAGKVAPDTAGGPVDVPVPDLRRASTRHADTFHSSTLATEHRFDRRRIEYALDALPQTVLRGKGFVELEGEATPALLQLCGSRWTLDPVSTPAPPAGTHLVFIATGGRGVPRFDAPSHFEQALASRDAASADTSN

SEQ ID NO: 7917 - DNA, 1002 bp, Bordetella parapertussis 12822
  CDS (1)..(1002): transl_table=11
atgagcaccatccccatcaccctgctgacgggtttcctgggcagtggcaagaccagcctgttgcggcgcttgatccaccagccgggattcgcgcgctgcgcggtgatcatcaatgagttcggcgaggtcgggctggaccaggccctggtggccgaccagtccgacgaccgcgatatccagctgctcgattccggctgcctgtgctgcctggccagcagcgcgatccaggatacgctggcctcgctgtactaccggcgcctgcgcggggaaattccctggttcgatcgcgtgctgatcgagacctcggggctggccgagcccggccccatcatcaacgccgtctatggcgacggggcgctggcgcgccagttccgcttcgccggcatcgtcaccaccttcgacgccggcttcggccaggtcgatgtccaggcgtatgccgaagcgaagacgcaactgctgatggccgacaccgtggtgctgaccaagctggacctgcatcccgaggcgcggcacctggccgcatggctgggcgagctgaacccgactgcccgggtctacgaaaacagcctgcccgacgacacgctggcgcgcctgctgctggacccggcggcggaccggccggcgccggcggcgcagggccatccctcggccggcgcgccgcaggccagcgcgctgcgccacttgctggcctacggcatccacagcgtgacggtcgatgtcctcgatgccatcggctggccggcctgggccgctttcgtgcacgaggtgcagcgcacattcgccgaccgcctgctgcggctcaagggcgtgctggccttcgagggccaggggcggatggcggtgcacgcggtgcatcacgtgttttccgcgcccgagccggccggggccgtaccgcccgccctggtcggaaaactggttttcatcgtgcgcgacatggaacgcgaggaggtcctgcacgccgtgcggcacctgagcggcgcgccgcccgccgatgctgcgtag

SEQ ID NO: 7918 - protein, 333 aa, Bordetella parapertussis 12822
MSTIPITLLTGFLGSGKTSLLRRLIHQPGFARCAVIINEFGEVGLDQALVADQSDDRDIQLLDSGCLCCLASSAIQDTLASLYYRRLRGEIPWFDRVLIETSGLAEPGPIINAVYGDGALARQFRFAGIVTTFDAGFGQVDVQAYAEAKTQLLMADTVVLTKLDLHPEARHLAAWLGELNPTARVYENSLPDDTLARLLLDPAADRPAPAAQGHPSAGAPQASALRHLLAYGIHSVTVDVLDAIGWPAWAAFVHEVQRTFADRLLRLKGVLAFEGQGRMAVHAVHHVFSAPEPAGAVPPALVGKLVFIVRDMEREEVLHAVRHLSGAPPADAA

SEQ ID NO: 7919 - DNA, 1110 bp, Bordetella bronchiseptica RB50
  CDS (1)..(1110): transl_table=11
atgaacaccgcgcgcagtctggacaaaatggttcccgtcacgatcctcaccggctttctcggtgcgggcaagaccaccctgctcaagcgcatcctgaccgaataccacggccggcgcgtggcggtgatcgaaaacgaattcgggcccgagagcatcgacaacgacctgctggtgcaggatcgcgacgaagaaatcatcgagctgtccaacggctgtgtctgctgcaccgtgcgcggcgacctgatgcgcacgctgtcggacctgcgcgccaggcgcgaagcgggcgaactgtcgttcgagcgcgtcatcatcgagaccaccggcatggccaaccccggcccggtgtgccagaccttcttcatggacgacgatatcgccgagtactaccgcctggacgcggtggtgacggtggtcgacgccaagcatggcatggcgaccctggacgcccaggacgaagcccagaagcaggtgggcttcgccgaccgcatcctggtttccaagaaagacctggtcaacgacgtcgactacgcagcgctgcaccagcgcctggtgcgcatcaacccgcgcgcgcccatcacgccggtgcatttcggcgaagccgacctcaagtccatcatcgacatcagcggcttcaacctgaactcgatcctggacatcgacccggccttcctggccgacgagcaccccgacgccgcccacgaccatcatgaccacgaccatggccacggccatgagcacgatcatgatcacgaaggcgagtgcggggcccattgcaaccatcaccaccatcatcaccacgcccaccacgatgacgaaatcggcgcgttcgtgtttcgctcgaacaagcccttcgatccagcccggctggaagaattcctgggcggcgtggtgcaggtctatggtcccgacctgctgcgctacaagggcatcctgtacatgaagggcatcaaccgccgcatgttgttccagggtgtgcacatgatgatgggcgccgaacccggcaaagcatggaccgcggccgaaaagccatccaccaagatggtgttcatcggccgcaagctgccccaggagattttcacccggggtcttgagcagtgcctggtcggataa

SEQ ID NO: 7920 - protein, 369 aa, Bordetella bronchiseptica RB50
MNTARSLDKMVPVTILTGFLGAGKTTLLKRILTEYHGRRVAVIENEFGPESIDNDLLVQDRDEEIIELSNGCVCCTVRGDLMRTLSDLRARREAGELSFERVIIETTGMANPGPVCQTFFMDDDIAEYYRLDAVVTVVDAKHGMATLDAQDEAQKQVGFADRILVSKKDLVNDVDYAALHQRLVRINPRAPITPVHFGEADLKSIIDISGFNLNSILDIDPAFLADEHPDAAHDHHDHDHGHGHEHDHDHEGECGAHCNHHHHHHHAHHDDEIGAFVFRSNKPFDPARLEEFLGGVVQVYGPDLLRYKGILYMKGINRRMLFQGVHMMMGAEPGKAWTAAEKPSTKMVFIGRKLPQEIFTRGLEQCLVG

SEQ ID NO: 7921 - DNA, 1011 bp, Bordetella bronchiseptica RB50
  CDS (1)..(1011): transl_table=11
atgacagccccgggcagcatgcccctgacggtgatcgggggttttctgggcgccggcaagaccactttgctcaactaccttctgaaggtccagcatagcgagcgtgtgctcgtcatggtcaatgacttcggctcgatcaatatcgacgcggaactcctggatcagggccggcatgaccgccccggcgtagtccgcctgcagaacggctgcgtctgctgctccattggcggagacttgatgcaggcattcctgcaagtgatgtcaatgcccgacaggccagaccgcatcatcgtcgaagcgagcggcgttgccgaccccacgcggatcgcgcagataggccgggtaagcggcggactcagcgatgaaggcgtgatcacgctggtggatgcgtcggctgtacggaccctggccgccgacaagtatgtcggcgatatcgtccgccagcagattctgagcgcggacattgtgctgctcaacaagctggatctctccagcgacgccgaaatcgtcgagaccagggcatggctgcgcgaccttgcgccgcgcacgcgcgtggtttcctgtatccacggcgaagtcgatgcggtctcggtcctgggtatcggcgccggcaaggttgcgccggacgccgccggcggccctgtcgatgtccccgtgcccgatctgcgccgcgcttcgacgcggcacgccgatacgttccatagctcgacgcttgcaacggcgcatcgcttcgatcggcgcaggatcgagtatgccctcgacgcgcttccgcagacggttttgcgaggcaagggatttgtggagctcgaaggcgaggcaacgcccgcattgctgcagctttgcggaagcagatggaccctggacccagtttccacaccggctccgcctgccggcacacatctcgttttcatcgcgacagggggcaggggcgtgccacggttcgatgccccgtcgcacttcgagcaggcgttggcatcgcgtgacgccgcttccgcggacacaagcaattga

SEQ ID NO: 7922 - protein, 336 aa, Bordetella bronchiseptica RB50
MTAPGSMPLTVIGGFLGAGKTTLLNYLLKVQHSERVLVMVNDFGSINIDAELLDQGRHDRPGVVRLQNGCVCCSIGGDLMQAFLQVMSMPDRPDRIIVEASGVADPTRIAQIGRVSGGLSDEGVITLVDASAVRTLAADKYVGDIVRQQILSADIVLLNKLDLSSDAEIVETRAWLRDLAPRTRVVSCIHGEVDAVSVLGIGAGKVAPDAAGGPVDVPVPDLRRASTRHADTFHSSTLATAHRFDRRRIEYALDALPQTVLRGKGFVELEGEATPALLQLCGSRWTLDPVSTPAPPAGTHLVFIATGGRGVPRFDAPSHFEQALASRDAASADTSN

SEQ ID NO: 7923 - DNA, 1023 bp, Bordetella bronchiseptica RB50
  CDS (1)..(1023): transl_table=11
atgtcggaagccacgcgcaaggtgccggtgacggtgttgacgggacacctgggggccggcaagacgaccctgctcaaccgcatcctgaccggccagcacgggcgcaagtatgccgtgatcgtcaacgagttcggcgagatcggcatcgacaacgatctgatcgtggaatccgacgaggaaatctacgagatgaacaacggctgcatctgctgcaccgtgcgcggcgacctgatcggcatcctgcacaagctgctgcgccggcccggccgcttcgacgccatcgtggtggaaaccaccggcgtggccgatccggcgccggtggtgcagaccttcatgatggacgaggaggtgcgcgagaagaccgagctggacgcggtcatcaccatggtcgacgccaagcattttccgctgcggctggccgacagccaggaggccgaggaccagatcgtctacgccgacgtggtgctcatcaacaaggtggacctggtgtcggccggcgaggcggaccaggtccagcgccgggtggcggcgatcaatccgtacgcggcctgccaccgcgtgcagcgcgccgagatcgacctggcgcgcatcctgtccatcggcgcgttcgacctgcagcgctgcgtcgagctggaggcgcgggccgcgccggccggctgcggccatgagcacgagcacgacgcgcattgccagggcgggaccgaccaccaccaccatcatcacgagatctcggtgatgtcggtgtcgctgcaggccggcgccctggatgggcggcgcttctttccctggatacacagcctggtggaaaagcaggggccggacatcctgcgcatgaagggcatcctggcgctcgatgacgacgcgcgccgctacatcatccagggcgtgcacatgatcgtcgagggcgagcaccagcgcgcctggcgcgacgacgaaccgcgcgccagcaagctggtcttcatcggccgtggcctggacgcccaggcgctgcgcgccggattcgaggcgtgcagatcgcaatga

SEQ ID NO: 7924 - protein, 340 aa, Bordetella bronchiseptica RB50
MSEATRKVPVTVLTGHLGAGKTTLLNRILTGQHGRKYAVIVNEFGEIGIDNDLIVESDEEIYEMNNGCICCTVRGDLIGILHKLLRRPGRFDAIVVETTGVADPAPVVQTFMMDEEVREKTELDAVITMVDAKHFPLRLADSQEAEDQIVYADVVLINKVDLVSAGEADQVQRRVAAINPYAACHRVQRAEIDLARILSIGAFDLQRCVELEARAAPAGCGHEHEHDAHCQGGTDHHHHHHEISVMSVSLQAGALDGRRFFPWIHSLVEKQGPDILRMKGILALDDDARRYIIQGVHMIVEGEHQRAWRDDEPRASKLVFIGRGLDAQALRAGFEACRSQ

SEQ ID NO: 7925 - DNA, 1002 bp, Bordetella bronchiseptica RB50
  CDS (1)..(1002): transl_table=11
atgagcaccatccccatcaccctgctgacgggtttcctgggcagtggcaagaccagcctgttgcggcgcttgatccaccagccgggattcgcgcgctgcgcggtgatcatcaatgagttcggcgaggtcgggctggaccaggccctggtggccgaccagtccgacgaccgcgatatccagctgctcgattccggctgcctgtgctgcctggccagcagcgcgatccaggatacgctggcctcgctgtactaccggcgcctgcgcggggaaattccctggttcgatcgcgtgctgatcgagacctcggggctggccgagcccggccccatcatcaacgccgtctatggcgacggggcgctggcgcgccagttccgcttcgccggcatcgtcaccaccttcgacgccggcttcggccaggtcgatgtccaggcgtatgccgaagcgaagacgcaactgctgatggccgacaccgtggtgctgaccaagctggacctgcatcccgaggcgcggcacctggccgcatggctgggcgagctgaacccgactgcccgggtctacgaaaacagcctgcccgacgacacgctggcgcgcctgctgctggacccggtggcggaccggccggcgccggtggcgcagggccatccctcggccggcgcgccgcaggccagcgcgctgcgccacttgctggcctacggcatccacagcgtgacggtcgatgtccccgatgccatcggctggccggcctgggccgctttcgtgcacgaggtgcagcgcacattcgccgaccgcctgctgcggctcaagggcgtgctggccttcgagggccaggggcggatggcggtgcacgcggtgcatcacgtgttttccgcgcccgagccggccggggccgtaccgcccgccctggtcggaaaactggttttcatcgtgcgcgacatggaacgcgaggaggtcctgcacgccgtgcggcacctgagcggcgcgccgcccgccgatgctgcgtag

SEQ ID NO: 7926 - protein, 333 aa, Bordetella bronchiseptica RB50
MSTIPITLLTGFLGSGKTSLLRRLIHQPGFARCAVIINEFGEVGLDQALVADQSDDRDIQLLDSGCLCCLASSAIQDTLASLYYRRLRGEIPWFDRVLIETSGLAEPGPIINAVYGDGALARQFRFAGIVTTFDAGFGQVDVQAYAEAKTQLLMADTVVLTKLDLHPEARHLAAWLGELNPTARVYENSLPDDTLARLLLDPVADRPAPVAQGHPSAGAPQASALRHLLAYGIHSVTVDVPDAIGWPAWAAFVHEVQRTFADRLLRLKGVLAFEGQGRMAVHAVHHVFSAPEPAGAVPPALVGKLVFIVRDMEREEVLHAVRHLSGAPPADAA

SEQ ID NO: 7927 - DNA, 1098 bp, Bordetella bronchiseptica RB50
  CDS (1)..(1098): transl_table=11
gtgttgcgccgtgtgcggccgccgcccgtggcgtgggcggcgcggccgtttcggggcggcaatggcgcgggcgggcccgcgcatgggaaagcgatggatgcgttcaagcaagacagccgcatcggcgtgacggtgttgaccggattcctgggcagcggcaagacgacgctgctcaatcgcctggtgcaggagcccgagtacgccgaggcggtggtcatcgtcaacgagttcggcgacataggcgtggaccaccatctggtacgcaatgtcgatgaccgtatcgtgctgctggagggcggatgcatatgctgcaccgccagcggcggcctggtcgatacgctgcgcgacctgttcatgctggcggtgcgccgccgcatcaagccgttcaagcgggtgctgctggagacgaccggcctggccgggcccgcctcggtcatgttctcgctgcgccacgatccgttcctggccgagcgctacgcgtatcatggcgcgatcgccatggtcgatgcgcagcacgtgcgcgaacagctgatggtgcagcccgaggcggcccagcagatcgcgctggcggacctggtcgtattcagcaaggcggacctggccggccaggcgcaactggccagcgccatgcgcgatgtggcgcgcgccaatccgggcgtgcccatgtgcgtggtgcgccgcggcgagccgctggatgagcggctgcgcggcgacttcctggtgcgcgagcgccggcaggcggcgcccctggggcgctggctgggcgcctttgccgcgccgccgggcggcccgcaccccaatgtggcgcatttttccctgaacctgtcggtgccgctgacgcgcggcatgttcctggcccggatgtcggagatccaggcggcctatgaccgcggcatcctgcgcatcaaggggttggtatgtttcgaggccgaagccttgccctgtgcggtgcacggggtgcatcggcagctgtatccgctggaggcgttgccgcaatggccgggcgacgaccgccagtcgcgcctggtgttcatcctgcgcggcctggaccgggacgcggtccgggccgatgtcgccaggcggctgcagcaggggtga

SEQ ID NO: 7928 - protein, 365 aa, Bordetella bronchiseptica RB50
MLRRVRPPPVAWAARPFRGGNGAGGPAHGKAMDAFKQDSRIGVTVLTGFLGSGKTTLLNRLVQEPEYAEAVVIVNEFGDIGVDHHLVRNVDDRIVLLEGGCICCTASGGLVDTLRDLFMLAVRRRIKPFKRVLLETTGLAGPASVMFSLRHDPFLAERYAYHGAIAMVDAQHVREQLMVQPEAAQQIALADLVVFSKADLAGQAQLASAMRDVARANPGVPMCVVRRGEPLDERLRGDFLVRERRQAAPLGRWLGAFAAPPGGPHPNVAHFSLNLSVPLTRGMFLARMSEIQAAYDRGILRIKGLVCFEAEALPCAVHGVHRQLYPLEALPQWPGDDRQSRLVFILRGLDRDAVRADVARRLQQG

SEQ ID NO: 7929 - DNA, 1095 bp, Prochlorococcus marinus subsp. pastoris str. CCMP1986
  CDS (1)..(1095): transl_table=11
atggcagaaaatttactccctattacgattattagtggattcttgggttcaggtaaaactacacttttaaatcatattttaaaaaatcaagttggaattaaaacggctgttttagttaatgaatttggagagataggtattgataatgaattaattataaaaactgctgaagatatgatcgaattaaataacggatgcatttgttgcacaataaacggagaattattaaacactgtttctaagatattagatagacctgaaaaaatagattatttaattgttgagactactggacttgcagatccactccctgtagcaatgacttttgccgggggtgatcttagagaaaaagtaagattagattccattattactattattgatgcagataactttgattttgatttaaaaaactctaatgttgcctactcacaaattctatatggtgatattttactactaaataaatgtgatttagtaactgatacacatttgaaaaagatagaacaatacattaatgggataaaaaaagaaccaagaattttgagatcgattaatagtgaagttggtttgcaaacaataatgagtgtgggacttttcgaaacagatacttttcaatttaaagagaaaatgattagtaatcaagattctcatgatcactcttcccattctcatgatcactcttcccattctcatgatcactcttcccattctcatgatcactcttcccattctcatgatcactcttcccattctcatgatcactcttcccattctcatgatttaataaataacatagaaggatttacatctatttcttttaagacgaatgaaccattttctttaagaaagtttcaaaacttcttagataatcaaatctcacaaaatgtatttagagctaaaggcattttatggtttatggaaagcgaaagaaaacatatttttcatttatctggtaaacgtttttctcttgatgactgtgaatgggaaaataaaaaatcaaataaaattgttctaataggaaaagatttagatcatcaaactattaagaatcagcttgattgttgtagatttaattatagagaagaagcataa

SEQ ID NO: 7930 - protein, 364 aa, Prochlorococcus marinus subsp. pastoris str. CCMP1986
MAENLLPITIISGFLGSGKTTLLNHILKNQVGIKTAVLVNEFGEIGIDNELIIKTAEDMIELNNGCICCTINGELLNTVSKILDRPEKIDYLIVETTGLADPLPVAMTFAGGDLREKVRLDSIITIIDADNFDFDLKNSNVAYSQILYGDILLLNKCDLVTDTHLKKIEQYINGIKKEPRILRSINSEVGLQTIMSVGLFETDTFQFKEKMISNQDSHDHSSHSHDHSSHSHDHSSHSHDHSSHSHDHSSHSHDHSSHSHDLINNIEGFTSISFKTNEPFSLRKFQNFLDNQISQNVFRAKGILWFMESERKHIFHLSGKRFSLDDCEWENKKSNKIVLIGKDLDHQTIKNQLDCCRFNYREEA

SEQ ID NO: 7931 - DNA, 1056 bp, Prochlorococcus marinus subsp. pastoris str. CCMP1986
  CDS (1)..(1056): transl_table=11
atgaataaaagaatacctgtaattgtaatttctggatttcttgggtctggtaagactacttttttaagatatttacttagagagagtaataaaaaatttgggttaataataaacgaatttggtgatgttgggattgatggagacttggttaaaagctgtaatggttgtgatgattcagatgaaggctgtattattgaattaaataatggttgtttatgttgcaccgttcaagatgattttattccctcgataaaatcacttttaaattttaatcctgacatagaagcaataatcattgagacgagtggacttgccttacccttaccattgatacaagcactcaattggcctgagataaggacatcaatatatcttgatgtcgtgattggcatagtcaatggagagtcaatgcttaagggctctccaataaatgatttaaatgaaataactaatcagtacgatgagttaaataagattgaccataatgcatccattgacgaactctttgaagaacagttagaggtttctgatatcgttctaatatctagagcagatgttttaaatgaaaaagaatttaaatctatcaaaaatttaatcaaagaaaagtttaattcaactgttcccattcttaagtctcttaatggcaaaattgatttaaagtatatatttgatattgatttaaaaaagaataattataaaaaatttatttctgaagaacatgatcataatcatgttgaacttgtctctgattcagtaaagttaaattattttcttgacaaaaaagaatttgagaaagagatagcaaacgttttaagtgaaattgatattcttcgaataaaaggacgtatatggattccaaaaaaatcattgcctttgcaaatacaaatagttggaaaaaaaataaatacttggtatgaagaagcacctcttaattgttggaggccaattgatagtggtggacttgaattagtcataatttcctttgatagtgaatcgattaataaatttataaaaaaaattaaagagaaatttaaggttttaaacgtcctaaaatag

SEQ ID NO: 7932 - protein, 351 aa, Prochlorococcus marinus subsp. pastoris str. CCMP1986
MNKRIPVIVISGFLGSGKTTFLRYLLRESNKKFGLIINEFGDVGIDGDLVKSCNGCDDSDEGCIIELNNGCLCCTVQDDFIPSIKSLLNFNPDIEAIIIETSGLALPLPLIQALNWPEIRTSIYLDVVIGIVNGESMLKGSPINDLNEITNQYDELNKIDHNASIDELFEEQLEVSDIVLISRADVLNEKEFKSIKNLIKEKFNSTVPILKSLNGKIDLKYIFDIDLKKNNYKKFISEEHDHNHVELVSDSVKLNYFLDKKEFEKEIANVLSEIDILRIKGRIWIPKKSLPLQIQIVGKKINTWYEEAPLNCWRPIDSGGLELVIISFDSESINKFIKKIKEKFKVLNVLK

SEQ ID NO: 7933 - DNA, 1359 bp, Prochlorococcus marinus subsp. pastoris str. CCMP1986
  CDS (1)..(1359): transl_table=11
atgagtatcaacgaaaaagttcctgttacaatccttactggattcttaggctcaggtaaaacaactcttcttaatagaatattaagtgaagagcatggtaagagaatcgctgttattgagaatgaatacggtgaagttgggatagatcaaggtcttgtaataaatgctgatgaagaagtatttgaaatgtctaatggttgcatttgttgtactgttcgcggagatcttattagagtccttggtaatttaatgaaaagaagggataaatttgactacgttttagttgaaacaactgggttagctgaccctggtcctgttgctcaaacattttttatggatgaagaaattagttctgaattcacacttgatggaatagttacattagttgatgcagctcatattgatcaacaacttgggcgtagtgatgagagttctgaacaagtggcatttgcagatgtcttagtccttaataaaacggatttagtctcaaatgatgctcttgacaaccttgaatcaagattaagagatatgaatcgaatgactcgtattattcgagcagagaaagcagatgttcctattgagacagttttaaatttaagtgctttcgatcttgaccaaattttaaagcgtagaccaactttcttagaacctgaatatccttttgaatggtcaggagtttatgagcttgagcctggaaaatatgaattaaaacttgaagaagggcctgatcctgaaatgtccttagtagcttttgctaatcaaggatttagtgaagaagaattaaaagagagtgcagaagcctctgtaagactttatgcagaaaaagctaaaaacttagaatctggaaatactattccatatgatgagcatgtaagtcttaaattgcaaaacaaaggatctaaatcttttattttggatattgaaaaagcgtcaaaaattggattgttcacacaacatactgctgaagaattcaatatgaaagtgctaaaaatagactcccaagataatgttaaggaaattccttttaaaactgaaagaaactgggtcgcagaacatgaacatgatgatgaagttggatcaattgcaatagagcgttttggagatgtagatcctgaaaagttgaatacttggatgggaagacttctttccgagaaaggagttgatatattcagaacaaaagggtttattagttattctggcaacccacgccgaatagtatttcaaggagttcatatgttatttactgcccaaccagataaagaatggggaaatgaaccacggagaaatcaactcgtgtttattggaagaaatctaaatgaaaaagaaatgcaagagggatttgataagtgcctgatatag

SEQ ID NO: 7934 - protein, 452 aa, Prochlorococcus marinus subsp. pastoris str. CCMP1986
MSINEKVPVTILTGFLGSGKTTLLNRILSEEHGKRIAVIENEYGEVGIDQGLVINADEEVFEMSNGCICCTVRGDLIRVLGNLMKRRDKFDYVLVETTGLADPGPVAQTFFMDEEISSEFTLDGIVTLVDAAHIDQQLGRSDESSEQVAFADVLVLNKTDLVSNDALDNLESRLRDMNRMTRIIRAEKADVPIETVLNLSAFDLDQILKRRPTFLEPEYPFEWSGVYELEPGKYELKLEEGPDPEMSLVAFANQGFSEEELKESAEASVRLYAEKAKNLESGNTIPYDEHVSLKLQNKGSKSFILDIEKASKIGLFTQHTAEEFNMKVLKIDSQDNVKEIPFKTERNWVAEHEHDDEVGSIAIERFGDVDPEKLNTWMGRLLSEKGVDIFRTKGFISYSGNPRRIVFQGVHMLFTAQPDKEWGNEPRRNQLVFIGRNLNEKEMQEGFDKCLI

SEQ ID NO: 7935 - DNA, 1119 bp, Prochlorococcus marinus str. MIT 9313
  CDS (1)..(1119): transl_table=11
ttgatttcaaagcgtctaccagtcactgttttgactggtttccttggagctggaaagaccaccttgctacgtcatctgctcactcatggggggcagcgtttagcggtcatggtcaatgaatttggcacgattggtcttgatggcgatttaatccgtagctgtggcttttgtccggaggaggaattggatggtcgagtcgttgaactcaataacggttgtctctgctgcacggtgcaggaagactttttacccaccatggagaccttgctgaaacaggcggataagttggatggaattatcgttgaaaccagtggccttgctcttcctcgccccctcttaaaagcgctcgactggcctgccgtacgcactcgagtttatgtgaatggagtggtcacaatggtggatggtgaagccctcgcagcgggtagccccgttggtgatcctgccgggttagaacggcagcgacaggaggatccaagccttgatcatctcagtgctgttgaagacttgttcactgatcagttggaagctgctgatttggtgttgatcagtcgagcggatgttgtctccaatgtcgacctccgcaagctcaaaagcgaacttgctgaaaaggtacgccttggcacgtcaatgatgcccatcagtcatggccaagttgatccagctgtggtgctaggcctcagtacgacagagaatagtgaccaacaaaagagcttgcctaaacaatttggcgacgacctaatcgacgatgcttccattgatgtcgatcatcatgaagatgatcatcatcatgaccacaaccatgtggagatggtgagtggtgtggtgcgctttgaaggttctgttgatcgggctacggttgaagcacttctgcctgagttggcaacacttcatcaggttgtacgcctaaaaggtcgcttatggctaccgggcaaagctttaccccttcagctgcagatggttggcccaaggcttagcagttggtttgaggctgctccaaagaacgcctggcatcctgaggaggcgggcgttgatctggtggtgcttagttttgaaaagcaagcagctgaagcgattcgctttgatcttgaaagctccttgatgtcagatattctctaa

SEQ ID NO: 7936 - protein, 372 aa, Prochlorococcus marinus str. MIT 9313
MISKRLPVTVLTGFLGAGKTTLLRHLLTHGGQRLAVMVNEFGTIGLDGDLIRSCGFCPEEELDGRVVELNNGCLCCTVQEDFLPTMETLLKQADKLDGIIVETSGLALPRPLLKALDWPAVRTRVYVNGVVTMVDGEALAAGSPVGDPAGLERQRQEDPSLDHLSAVEDLFTDQLEAADLVLISRADVVSNVDLRKLKSELAEKVRLGTSMMPISHGQVDPAVVLGLSTTENSDQQKSLPKQFGDDLIDDASIDVDHHEDDHHHDHNHVEMVSGVVRFEGSVDRATVEALLPELATLHQVVRLKGRLWLPGKALPLQLQMVGPRLSSWFEAAPKNAWHPEEAGVDLVVLSFEKQAAEAIRFDLESSLMSDIL

SEQ ID NO: 7937 - DNA, 1068 bp, Prochlorococcus marinus str. MIT 9313
  CDS (1)..(1068): transl_table=11
atgaacgacgcaatcgcatccgaagcaaccactcaacctgatcatggcgaagcgctcgagcaagaccggtgcgtaccggtaacaatcctcactggcttcctaggcgccggcaaaaccaccctgctcaatcacatcctcagcaatcagaacggaatcaaaaccgccgtattggtgaatgaattcggtgaaattggaatcgacaacgagctgatcgtgaccaccggcgatgacatggtcgaactcagcaatggctgcatctgctgctcgattaatggggagctgcttgaagcggttgatcggattctcgaacgtccagacccaatcgattacctcgttgtagaaaccacaggcctggcagatccgctacccgttgccatgacctttcttggcagtgaactgcgagatcaaacccgcttggattcgatcattaccttgatcgacgcggaaaactttaacgaccaactcctggaaagcgaagtcggcagagcccaggtgatctatggcgacatcctgctgctcaacaaaacagatctcgtccctgaagagcgattaaaagaggttgaatccaagttggcagacctcaaacaaaatccgcgcatccttcgatcaatcaaagggaacgtgcccttaccgctactgctaagcgtgggcctgtttgaaaccgatcgcgtacaaccagcagaccttgcagagagccacgatcacagtcatcaccacgacgatcacagtcatcaccacgatgaccaccctgatcacctagcaatcgaaggcttcacatccctatccttcagcagcgatgacccttttgcgctgcggaagttccaaaatttcttagacaatcaacttcctgcagaagtctttcgtgccaaagggattctctggttcaacgagagcgaacgccgccacatctttcatttagccggcaagcgcttctccattgatgacagcgactggcccgctgagcgcaagaaccaactggtgttgattggacgccaactcgatcacgacaccctgcgacgccaacttcaggcctgcgtagcaaaggacgccggcaaagggttcagctga

SEQ ID NO: 7938 - protein, 355 aa, Prochlorococcus marinus str. MIT 9313
MNDAIASEATTQPDHGEALEQDRCVPVTILTGFLGAGKTTLLNHILSNQNGIKTAVLVNEFGEIGIDNELIVTTGDDMVELSNGCICCSINGELLEAVDRILERPDPIDYLVVETTGLADPLPVAMTFLGSELRDQTRLDSIITLIDAENFNDQLLESEVGRAQVIYGDILLLNKTDLVPEERLKEVESKLADLKQNPRILRSIKGNVPLPLLLSVGLFETDRVQPADLAESHDHSHHHDDHSHHHDDHPDHLAIEGFTSLSFSSDDPFALRKFQNFLDNQLPAEVFRAKGILWFNESERRHIFHLAGKRFSIDDSDWPAERKNQLVLIGRQLDHDTLRRQLQACVAKDAGKGFS

SEQ ID NO: 7939 - DNA, 1137 bp, Synechococcus sp. WH 8102
  CDS (1)..(1137): transl_table=11
atgagtcgacgtctaccggtcaccgtgatcaccggtttccttggtgccggtaaaacaaccgttctgcgccatctgctcacgcgcagtggtcagcgtctggccgtgatggtcaatgaattcggcagtgtcggactggatggggatctgattcgcagttgcggtttctgccccgacgatgaggtagacggccgtctcgtggagctcaacaacggctgcctgtgttgcacggtgcaggacgacttccttccgacgatggaacagctgctggagcgggcggatcagctggatggaatcgttgtggagaccagtggtctggcgttgccgcgtccgttgctgcaggccctggactggccggccattcgcagccgtgtgcacgtgaacggtgtagtgactctggtggacggtgaagccctggccacaggtagccccgttgcggatcgggaggcactggagcagcagcgtcgggatgatcccagccttgatcacatcactgcgatcgatgagttgttccgtgatcagcttcaggccgcggatctcgttctgctcagccgtgccgatcggctgtcgccatcgcagctggatgcgctgcaaaccaacctgaaagaaaagaccaggccgggcacggcactactcccagtggcccatggcgccgtggacacctcggtggtgctcggtttggagcatcacgccggcgagccaaccgaccatcacaaccacgacgaccaccaccactacgaccacgaccatcacggccatgaccatgaccacgatcatcacgatcacagccatgtcgcgatggtgagtggcggtcttcgtctggagggggaatttgatcgggctgctctcgaacaactgctgccccgagtggtgagtgagtttcaggtgctgcggctgaaaggacgcgtctggctgccgggcaagaccctgcctttgcagctgcagatggtgggcccacggctcaacagctggttcgaggctgctccgactgcagcttggcgacccggcagtggagcgggcgtggatctggtggtgctgtctctgcaggagtcagccaccgcaacgatcgagcaggcgcttcagacgctgcaggccaccccggccaccgccagcaccgcagccaggaccccacggggctga

SEQ ID NO: 7940 - protein, 378 aa, Synechococcus sp. WH 8102
MSRRLPVTVITGFLGAGKTTVLRHLLTRSGQRLAVMVNEFGSVGLDGDLIRSCGFCPDDEVDGRLVELNNGCLCCTVQDDFLPTMEQLLERADQLDGIVVETSGLALPRPLLQALDWPAIRSRVHVNGVVTLVDGEALATGSPVADREALEQQRRDDPSLDHITAIDELFRDQLQAADLVLLSRADRLSPSQLDALQTNLKEKTRPGTALLPVAHGAVDTSVVLGLEHHAGEPTDHHNHDDHHHYDHDHHGHDHDHDHHDHSHVAMVSGGLRLEGEFDRAALEQLLPRVVSEFQVLRLKGRVWLPGKTLPLQLQMVGPRLNSWFEAAPTAAWRPGSGAGVDLVVLSLQESATATIEQALQTLQATPATASTAARTPRG

SEQ ID NO: 7941 - DNA, 1116 bp, Synechococcus sp. WH 8102
  CDS (1)..(1116): transl_table=11
atgacgaccgcacccgtcgcctccggcacacccgtaaccattctgagcggctttctgggggcggggaaaaccaccctgctgaaccacatcctcagcaatcagcagggggtgaaaaccgctgttctggtgaatgaattcggcgagatcggcatcgacaacgatctgatcgtgtccaccggggaagaaatggtggaactcagcaacggctgcatctgttgctcgatcaacggcgaactgatggagtccgttgagcggattctggagcgccctgagcccctggattacatcgttgttgaaaccaccggactggctgatccactgcccgtggccatgacctttctcggcagtgagctgagggactcaactcgtctcgactcgatcatcaccttgattgatgcggagaatttcgaggtgggcctgctggactccgagattggacgggctcaggtgatctatggcgacatcctgctgctgaacaaatgcgatctcgtcgctgaagagcggctggcggaggtggaagcggaattacgggccgtcaaaaacgatgcccgcatcctgcggtcggtgaagggggatgtgcccctggccctgctgctgagtgtcggcctgttcgaatccgacaaggtggccacgcctgtggaggacccaagcctcgaccacagcgactgtgatcacgaccatggccactgcagccatgaccatgaccatgaccatgaccacagcgacgggcatcaccacagccatgggcatgaccacgatcacacccatgggcatgaccacagccatggggaagactcggatcatctggccatcgaagggttcacgtccctgtccttccagagcgatggtcccttctccctgcgcaaattccagaacttcctggacaaccagatgccccaggaggtgttcagggcgaaggggattctctggttcaacgaaagcgagcgacgccacgtgtttcacctcgctggcaagcgcttctccatcgacgacaccgactggacaggcgatcgcaagaatcaattggtgctgattggtcgcaacatcgaccacaccaccctgcgccagcagctgaacgcctgcgtggcaaaagatgccggcaagggattttcctaa

SEQ ID NO: 7942 - protein, 371 aa, Synechococcus sp. WH 8102
MTTAPVASGTPVTILSGFLGAGKTTLLNHILSNQQGVKTAVLVNEFGEIGIDNDLIVSTGEEMVELSNGCICCSINGELMESVERILERPEPLDYIVVETTGLADPLPVAMTFLGSELRDSTRLDSIITLIDAENFEVGLLDSEIGRAQVIYGDILLLNKCDLVAEERLAEVEAELRAVKNDARILRSVKGDVPLALLLSVGLFESDKVATPVEDPSLDHSDCDHDHGHCSHDHDHDHDHSDGHHHSHGHDHDHTHGHDHSHGEDSDHLAIEGFTSLSFQSDGPFSLRKFQNFLDNQMPQEVFRAKGILWFNESERRHVFHLAGKRFSIDDTDWTGDRKNQLVLIGRNIDHTTLRQQLNACVAKDAGKGFS

SEQ ID NO: 7943 - DNA, 1383 bp, Synechococcus sp. WH 8102
  CDS (1)..(1383): transl_table=11
atgaaagaaaagcgaaaggttcctgtcaccatacttactggctaccttggggcagggaaaaccacactgttaaacaagatcttgagagaagagcacggcaaaaagattgcagtcatagaaaacgaatacggcgaagttggaattgatcaaggactcgtcattaatgcagacgaagaggtctttgaaatgtctaatggttgcatttgttgcacggtaagaggtgatctgataagagtcctaggcaatctaatgaaacgtagggacaaatttgattacgttttagttgaaacgaccggcctcgctgacccagggccggtagcacaaactttttttatggatgatgaagttagagatgaatttactcttgatggaatagtgacgttagtagattctgctcacattaatcaacaattagaacatagcactgaaagtgcagagcaggtcgccttcgcggacgtactcatactcaataaaactgacttagtttccaaaaacgaagtcaacgtacttgaatcacgccttagagatatgaacaaaatggcccgtatactgcgttcaaaagaagcaggggtcgatgttgaagatgtcttgaatcttggtgcatttgatctccagcaaacattagatagacgtccgacatttctcgaacctgaatatccgtttgagtggaccggagtatatgaacttaagaaaggaaactacaggctttattttgatgatggacctgatccaacaatgctaataacagcaatagaatttaatagttcaaatggaaaagatcttgacgggtacgccgaagattgtgtaagaatattttcaaaagaacctaaacaacttatgccaggtgaagcaataagttttaacgaggttattgaattacaattacaagatgcgggtcagaaggcctttgaattatacatagataataaatcaactataggtctcttcacccaacatacggcagaagaattcaatataagactggatgacaataaggatgatcagacaagagataaaaaatttagcaatataactaaggggattgatacaaagaccgaaagaatatgggtagctgaacacgagcatgacgatgaagttggatctattgctctagaaagccttggcaacattaatccagataaattaaacgattggatttcaaaacttctccgagaaaaaggagtagatatatttagaaccaaaggatttatcagctacgctgaagaatctagaaaaattgtatttcaaggggtccatatgttatttactgcagagcctggaagcgagtggggaaacgagcccaggaagaaccaacttgtattcataggccgaaatttagacgaggatgcattaaggactgagtttgaaaaatgtctagcatga

SEQ ID NO: 7944 - protein, 460 aa, Synechococcus sp. WH 8102
MKEKRKVPVTILTGYLGAGKTTLLNKILREEHGKKIAVIENEYGEVGIDQGLVINADEEVFEMSNGCICCTVRGDLIRVLGNLMKRRDKFDYVLVETTGLADPGPVAQTFFMDDEVRDEFTLDGIVTLVDSAHINQQLEHSTESAEQVAFADVLILNKTDLVSKNEVNVLESRLRDMNKMARILRSKEAGVDVEDVLNLGAFDLQQTLDRRPTFLEPEYPFEWTGVYELKKGNYRLYFDDGPDPTMLITAIEFNSSNGKDLDGYAEDCVRIFSKEPKQLMPGEAISFNEVIELQLQDAGQKAFELYIDNKSTIGLFTQHTAEEFNIRLDDNKDDQTRDKKFSNITKGIDTKTERIWVAEHEHDDEVGSIALESLGNINPDKLNDWISKLLREKGVDIFRTKGFISYAEESRKIVFQGVHMLFTAEPGSEWGNEPRKNQLVFIGRNLDEDALRTEFEKCLA

SEQ ID NO: 7945 - DNA, 1107 bp, Chromobacterium violaceum ATCC 12472
  CDS (1)..(1107): transl_table=11
atgagcgcgccgcgccttcccgtcaccgtgttgaccggtttcctcggcgccggcaagaccacgctgctgtccaagctgctggagaacaacaagcagcggcggctggcgatactggtaaacgagttcggcgaggtgtcgatagacggcggcctgctgcgcgacggcgagaaccagggcgtcgagatccacgacctggccaacggcctggtcgcctacgacgacgacgccgacttcctgcccaccatgctggcgctgtggcagcgccgccagcagatcgaccacgtgctgatcgaaacctccggcctcgcgctgcccagcgcggtgatggcccagctgcaaagcgaggcgctggcgccctatttcgtgctggacgcgacgctggcggtggtcgacaccccgctgctgctggccgggcacttcgcgccggccggagacggcggcaagaccgacgcggtggcggcgctgttcgaccagcaactgggccacgccgacatcgtggtgctgaacaagatagacgcgctgtccgccgaccagctgctggcggcggaggaagccgtgcgcaagcaagcgccgtcgatccgcttcatcgagctggcctatgaggccaagctggacacccggctgacgctgggcctgcatctgcacgaggcctcgccggccgcgcaccgccattacggcccggtggccagcatgccagggctggcgatgcggccgctggccaaccaaacgctgttggacggccacagccacggcggccaggcggcgcacagccacggcctggccacccacaagcatttccacgagcaggacccgggctggcaatcgttcatgatccgcagcaaggagccgcagtgcgccgacaagctggccgccgcgctgcaggccatcgcccgcgaggagccgctgctgcgcatcaagggcttcgccgcctgcgccgacagtcctggccggctgctggcccagggcgtgcgcagccgtatcgagctgagccgcgacgacacgctggccgcgccgcgccaggcgcagctggtcttcatcggctaccaccccagccgcccgcgcgtggtggccttgctgcgcgacatcaccggcgcgcactggagttag

SEQ ID NO: 7946 - protein, 368 aa, Chromobacterium violaceum ATCC 12472
MSAPRLPVTVLTGFLGAGKTTLLSKLLENNKQRRLAILVNEFGEVSIDGGLLRDGENQGVEIHDLANGLVAYDDDADFLPTMLALWQRRQQIDHVLIETSGLALPSAVMAQLQSEALAPYFVLDATLAVVDTPLLLAGHFAPAGDGGKTDAVAALFDQQLGHADIVVLNKIDALSADQLLAAEEAVRKQAPSIRFIELAYEAKLDTRLTLGLHLHEASPAAHRHYGPVASMPGLAMRPLANQTLLDGHSHGGQAAHSHGLATHKHFHEQDPGWQSFMIRSKEPQCADKLAAALQAIAREEPLLRIKGFAACADSPGRLLAQGVRSRIELSRDDTLAAPRQAQLVFIGYHPSRPRVVALLRDITGAHWS

SEQ ID NO: 7947 - DNA, 1350 bp, Gloeobacter violaceus PCC 7421
  CDS (1)..(1350): transl_table=11
atggaaagtaaccgtgtaccggtgacagttctgaccggttttttgggttcggggaagacgacgctcttgaaccgcatcctcaccgaggagcacggcaagcgcatcgccgtcatcgagaacgagttcggcgaaatcggcatcgaccaggccctggtcgtcaacgccgaagaagaaatcttcgagatgaacaacggttgcatctgctgcaccgtccgcggcgacctcatccggatcatcggcagcctgatgcgccgcaaggacaagttcgaccacatcctggtcgagaccacggggctcgcggacccctcgcccgtggcccaaacgttcttcgtcgacgacgagatgcgcagtcaactcaagctcgacggcatcgtgacggtggtggatgcccggcacatctggcagcacatcgaccagagcgatcagtgcaaggagcagattgccttcgccgacgtcatcctgctcaacaaaaccgacctcgtcacccccgaagagctggacaccctggagcaacgggtacgctcgatgaacgccctggcgcgtgtccatcgcacccaaaatgcagcggtggagatggaccgggtgcttgagatcggcggatttgatctggagcgggcgctcgcggtcaagccgacttttctggaaccggaataccccttcgagtggggtgggatctacgaactggcggccggaacctacacgcttgccctgcaggatggtcctgattcgagcatgacgcttgccctcttcgcggccgaaggtaccgacgaggccgccctggaagctgcccagcaagaggcggtgcccctcttctcgcagcaggcaccgccggtccatcccaaaggcgcgctggtgccccaggcagcacccgtcgccctcaacctggcgaaggcgggcgcgaaagactttttccttgaaatccagatggcggggacctactcccttttcacccagcaccgcccggaagaattcgacctgacggtgcacgccgccgacggtgccacccgtacaccccgaatcggacggactttcgaggcggggcacacccacgacgaggaggtgacctcggtgggtatcgaagtgcaaggggcggtcgacccaaagaagttgagcgcctggctgagcgttctgttgcgcgaacagggggtcgatatctttcggacaaagggcattctccacctgcagggcgacaaccgccgctatgtgtttcagggcgtgcacatgctcttcgatagcagcgccgatcggccctggggcagcgacgaaccccgcaccaatcaactggtcttcatcggccgcaacctcgatcgcaaccggctggtgcgggagttcaaagcgtgtctggtctga

SEQ ID NO: 7948 - protein, 449 aa, Gloeobacter violaceus PCC 7421
MESNRVPVTVLTGFLGSGKTTLLNRILTEEHGKRIAVIENEFGEIGIDQALVVNAEEEIFEMNNGCICCTVRGDLIRIIGSLMRRKDKFDHILVETTGLADPSPVAQTFFVDDEMRSQLKLDGIVTVVDARHIWQHIDQSDQCKEQIAFADVILLNKTDLVTPEELDTLEQRVRSMNALARVHRTQNAAVEMDRVLEIGGFDLERALAVKPTFLEPEYPFEWGGIYELAAGTYTLALQDGPDSSMTLALFAAEGTDEAALEAAQQEAVPLFSQQAPPVHPKGALVPQAAPVALNLAKAGAKDFFLEIQMAGTYSLFTQHRPEEFDLTVHAADGATRTPRIGRTFEAGHTHDEEVTSVGIEVQGAVDPKKLSAWLSVLLREQGVDIFRTKGILHLQGDNRRYVFQGVHMLFDSSADRPWGSDEPRTNQLVFIGRNLDRNRLVREFKACLV

SEQ ID NO: 7949 - DNA, 1038 bp, Gloeobacter violaceus PCC 7421
  CDS (1)..(1038): transl_table=11
atgcagattcaagagcgtggcctacctgtcacggtaatcaccggatttttgggcagcggcaagacgacgctggtcaaccacatcctgcgcaacaaccagggcatcaaaacggccgtaatcgtcaacgaattcggcgatatcggcatcgacagcgaactgatcgtctccaccgaagaagacatggtcgaactggagaacggctgtatctgctgcaccgtccgcgacgacctggtgcaggccaccctgcgcattctggagcgtgatcaaaaagtcgactatctggtggtcgagaccacgggccttgctgatccgctgccggtggcgatgacgtttttgggtcccgaactgcgcaacgtcacccgcctcgacggcatcatcggcgtcgtggacgccgagaattttgccccgacgctgttcaattccgagaccgccgccaaccagatcgcctactcggatattattttgctcaacaagaccgactgcgtcgaacacgaagcgctcgaacggctcgaagggcagatccgcgaactcaaagaggacggtcctatcctgcgcaccgaatacggccgagtggatctacgcatgatcctcgatgtgggcgtcttcaagctcgaagagcaattcgccgaagccgagacggaggagcacgggcacgtccacggtcccgactgcggccacgatcaccacgagcatgaccacgggcatagccacgaccaccatgaccacgatcacgaccatcaccaccacaaccacatcgaggcggaaggctttacctcgatctcgctggtatccgagcggccccttgccgccaagcaattcgagcagttcctcaaagatctgccccagggtgtttttcgaggcaagggcatcctgtggctggcggagtcgccggaaaaagtgatctttcacctggtgggcagccgcatccgcatcgaccgcgaaacctgggacggcgcacgcaagaatcaggcggtcttcatcggcaaggattttgaccgcgaggcgctcaaggcccgctggtcggagtgtctggcttga

SEQ ID NO: 7950 - protein, 345 aa, Gloeobacter violaceus PCC 7421
MQIQERGLPVTVITGFLGSGKTTLVNHILRNNQGIKTAVIVNEFGDIGIDSELIVSTEEDMVELENGCICCTVRDDLVQATLRILERDQKVDYLVVETTGLADPLPVAMTFLGPELRNVTRLDGIIGVVDAENFAPTLFNSETAANQIAYSDIILLNKTDCVEHEALERLEGQIRELKEDGPILRTEYGRVDLRMILDVGVFKLEEQFAEAETEEHGHVHGPDCGHDHHEHDHGHSHDHHDHDHDHHHHNHIEAEGFTSISLVSERPLAAKQFEQFLKDLPQGVFRGKGILWLAESPEKVIFHLVGSRIRIDRETWDGARKNQAVFIGKDFDREALKARWSECLA

SEQ ID NO: 7951 - DNA, 987 bp, Vibrio vulnificus YJ016
  CDS (1)..(987): transl_table=11
atgaacaacaaggttccggcgaatatcattacgggttttctcggtgtaggaaaaaccaccaccattctcaatttactgaaagaaaagccagccaatgaaaagtgggcggttttggtgaatgagtttggcgagattggcattgacggtgcaatgatgaccgacagcggagcgctgatcaaagaagtaccgggtggctgtatgtgctgcaccgcaggcgtgccgatgagtgttggtatcaacacattgttgcgtcaaaagcccgatcgtctgcttatcgaaccaacagggcttggtcacccgaaacaagtgattgccacattgacgtctgcgcaatatgaaccgtatgtcgatcttaaagcgaccattgcgctggtggacccacgcaacctcagcgatgaaaagtacctgaacaaccagaacttcaacgaccaactcgacagtgcagatgtggtgattggcagtaaagtggacctttgtacttcgcatgacattgatgttttcaatgattgggtgaccgaccaatcgccttccaaagtctttagtaagttgattcatgatggtcagttgccggtagaagtgctggatattgaacgtgtttacggcagtgcttcaacgcatattgaaccgcatcaccaccatcatgcggagatggagccacagtttgaattgccacctggtcgtgcgtttgtgcgcaaagagaataaaggccaagggtattacagttgtggttggctaattggtgctgaatatcgctttgagtttgaggcgcttttttcaatgttctcagcattaactgcagagcgagtgaaagcggtagtgaacacagatcaaggctgttacgcctttaacgtcgccaatggcgttgtgtcggtgaatcaaatgagcttggaaggattcgaatccagaatcgaagttatcgattcacagctaatgccatgggatgaacttgaaacgatcctgctgaaattggcgaatattcacggatag

SEQ ID NO: 7952 - protein, 328 aa, Vibrio vulnificus YJ016
MNNKVPANIITGFLGVGKTTTILNLLKEKPANEKWAVLVNEFGEIGIDGAMMTDSGALIKEVPGGCMCCTAGVPMSVGINTLLRQKPDRLLIEPTGLGHPKQVIATLTSAQYEPYVDLKATIALVDPRNLSDEKYLNNQNFNDQLDSADVVIGSKVDLCTSHDIDVFNDWVTDQSPSKVFSKLIHDGQLPVEVLDIERVYGSASTHIEPHHHHHAEMEPQFELPPGRAFVRKENKGQGYYSCGWLIGAEYRFEFEALFSMFSALTAERVKAVVNTDQGCYAFNVANGVVSVNQMSLEGFESRIEVIDSQLMPWDELETILLKLANIHG

SEQ ID NO: 7953 - DNA, 1125 bp, Corynebacterium diphtheriae NCTC 13129
  CDS (1)..(1125): transl_table=11
atgtcgcattcaactcccgtcaccgtcttgtctggtttcctagggtcaggaaaaaccacgcttctcaaccaaatgctgtccaaccgcgaatccaaaaaaatagcggtcattgtcaatgacttttcagaaatcaacattgatgcagctctcatcgcaggtgaagggcatctcgaacgcggcgaagacaaatttgttgaactaaccaacggctgcatttgctgcacgcttcgcgacgacctcgtccagtccgtcggcgcactagcatcaagcggcgactacgatcacatcgtgattgaatcaacgggcatatccgaaccaatgccggttgccgccaccttcgaatgggtatgggacgatggaactcgcctagccgacattgcaccgatcgacacgatggcaactcttgttgacgcttctcagttcctgacctacatgggcaagaaaacctacctcactgaccgtgatctaggtgtaaccgaagacgacgaacgaacaattgctgatttgctcgttgatcaagtggaattcgctgacaagatttacatcaccaaatcagacctcgtcgatgacgagcgataccatgccaccaaagcactcgtgcgtcgtatgaatccccgcgcaagtatcgacaaacttgtcaacggtcgagtcatcactgccagcggtgaaaaccgaaatgccattaatgacctcctcggagccatgtgctacgacgaagaaactgcgcggacctatcaagggtatgttgcagaactagataatccacacaccccagaaactgaggaatacggaattagctctttcgtattcaaaggagatcgtccctttgaccggcagcgcctcatagccgccttacgctcaactcgtggcatcgtgcgttccaaaggacactgctggatttccgaccgcatcgatatggtacaggtatggcaccaagccggacctgacctacggattgcgcctgcaggctactggcaatcagccggaattacaccctcaaacgaaattgtcgtcattggcgtaaattttgatcacgctcaagcccagcaacttctcaatgacgccatgctcagcgattccgaagtacaacaactgctgagcaccgccgatgcagccaagagctag

SEQ ID NO: 7954 - protein, 374 aa, Corynebacterium diphtheriae NCTC 13129
MSHSTPVTVLSGFLGSGKTTLLNQMLSNRESKKIAVIVNDFSEINIDAALIAGEGHLERGEDKFVELTNGCICCTLRDDLVQSVGALASSGDYDHIVIESTGISEPMPVAATFEWVWDDGTRLADIAPIDTMATLVDASQFLTYMGKKTYLTDRDLGVTEDDERTIADLLVDQVEFADKIYITKSDLVDDERYHATKALVRRMNPRASIDKLVNGRVITASGENRNAINDLLGAMCYDEETARTYQGYVAELDNPHTPETEEYGISSFVFKGDRPFDRQRLIAALRSTRGIVRSKGHCWISDRIDMVQVWHQAGPDLRIAPAGYWQSAGITPSNEIVVIGVNFDHAQAQQLLNDAMLSDSEVQQLLSTADAAKS

SEQ ID NO: 7955 - DNA, 1239 bp, Klebsiella pneumoniae
  CDS (1)..(1239): transl_table=11
ttgattgcattaacgtttagcggcataaggctggatgctatgaaaagaacaccgctcattatccttaatggttttctgggagcaggaaaaactactctgctaaaaaaccttcttacacaggcacacaaacggcgaatggctgtatccgtcatcgttaatgacatgagtgaacttgatgtggatggcgtcctgatagccaacacagaaatcgttgatgcagccagtaacaattttgtgagtatttcagcagacagtatcagcagcagaagtgggatccagaagctggattccgcgctgaaaaacctgctcgaaaaacggtctccggattttattttactggaaacgtcaggcagcagccatcctcttcccctggtccgctatctgcgggaacacccccaggtaagtcttaaagcatttttgtcgcttgtagatacggtcatgcttaatgatgactacgacggtggaaagaaacttattccggttttccaggagcacctcaacagagggacccggggagtggaaagcctgctggcagaacagattatgttctgtaataagctcttgttaaccaaaaacgacagattacccttctatgttgttactgaggtagccagagccatacatccccttaatccgcaggttgcaattatggccgtgccctggggaaatttacagctggatgaattgctttccatgccggattacgattttcatcgggtggcgttacttatcgatgagcttcaggatgcaattgatgcagttttgtcggatgaacccgacaaaaaatatgatatttcgtggcgggtcattgaggatgaccgtccatttcatccgcagcggctgtgggatacctgccatcgcttcatgggcgcaggcgtttaccgcagcaagggttttttctggctaccgggaagggatgacctggcattattgtggaaccaggcagcagggagcatcaatctcgaattcataagctactggaaagccggggtcctgactcacactgataattcattgacaaaggaagaacgcgcagctatccgtcagcaactggcaaaaatgccgggcagatttggtgaccggcgctgccgcctgactgttattggcgagagcggcgaaattgacgattttgccctcgcattgcgccagtgtttactcactgaagaggaaattctctggtggcagcagggggggattttccacgatccctggcccacgaaagtggcccggctggcttaa

SEQ ID NO: 7956 - protein, 412 aa, Klebsiella pneumoniae
MIALTFSGIRLDAMKRTPLIILNGFLGAGKTTLLKNLLTQAHKRRMAVSVIVNDMSELDVDGVLIANTEIVDAASNNFVSISADSISSRSGIQKLDSALKNLLEKRSPDFILLETSGSSHPLPLVRYLREHPQVSLKAFLSLVDTVMLNDDYDGGKKLIPVFQEHLNRGTRGVESLLAEQIMFCNKLLLTKNDRLPFYVVTEVARAIHPLNPQVAIMAVPWGNLQLDELLSMPDYDFHRVALLIDELQDAIDAVLSDEPDKKYDISWRVIEDDRPFHPQRLWDTCHRFMGAGVYRSKGFFWLPGRDDLALLWNQAAGSINLEFISYWKAGVLTHTDNSLTKEERAAIRQQLAKMPGRFGDRRCRLTVIGESGEIDDFALALRQCLLTEEEILWWQQGGIFHDPWPTKVARLA

SEQ ID NO: 7957 - DNA, 1221 bp, Klebsiella pneumoniae
  CDS (1)..(1221): transl_table=11
atgtctgaagtcagtgcaaattttcatggcgataaacgcctgccggttaccgtactttcgggatttttgggagcagggaaaacgacactgcttaaccatattctgaacaaccgggaaggccgacgggtggccgttattgtgaacgatatgtcagaagtgaatattgatgctgcgctggtcagggatggcggtgcagagctctcccgtacggatgaaaaactggtagaaatgagtaacggttgtatctgctgcacattgcgggaagatcttctgcttgaagtcaatcgtctggcaaaagaaggacgttttgaccagcttgtcattgagtccaccgggatttcagagcctctgcccgtagctgagacttttacctttgccggtgatgacggtgaaagcctgtcaacagtagcgcgccttgataccatggtgaccgtggtggatgcgttcaattttctgaaagactacggctcggaagacagcattcagtcgcgtggagagtcgctcggtgatggtgatgaaaggagcgttgtagacctgctgatcgatcagattgaattctgcgatgtgctggtcctcaataaagttgatctcatcagtgaagcgcaaaaagacaaactgatggcggttttacgttcgcttaatccacgggccaggatcgttgtttcacagtttgggaaggttccacttgataacgtacttaataccggactgttcgatttcgatcaagccgctcaggcacctggctggcttaaagaattgcggggtgaacatacgccggagacagaagagtatgggatcaccagctttgtatttcgtgcccgccggccttttcatccggctcgtttctggcaggtgatggataatgaactgaatggcgtcgtcagatcgaaggggtacttctggctggccagtcgtcctgagtttgctggctcctggtcgcaggcgggtggagtggcgcgccagggactgggaggcatgtggtgggcaagtgtccctaaagaacgctggccagaggatccggaatcactcaaattcatcatgtctcactggatggatggtattggtgatgcccggcaggaactggtttttattggaatggaaatgaatgaatccgaactgcgcaacaggctggaatctgccctgttaacggataccgaaatggctgaaggacctctgaaatggcgacattaccctgatcctgttgagccgtggttcgattag

SEQ ID NO: 7958 - protein, 406 aa, Klebsiella pneumoniae
MSEVSANFHGDKRLPVTVLSGFLGAGKTTLLNHILNNREGRRVAVIVNDMSEVNIDAALVRDGGAELSRTDEKLVEMSNGCICCTLREDLLLEVNRLAKEGRFDQLVIESTGISEPLPVAETFTFAGDDGESLSTVARLDTMVTVVDAFNFLKDYGSEDSIQSRGESLGDGDERSVVDLLIDQIEFCDVLVLNKVDLISEAQKDKLMAVLRSLNPRARIVVSQFGKVPLDNVLNTGLFDFDQAAQAPGWLKELRGEHTPETEEYGITSFVFRARRPFHPARFWQVMDNELNGVVRSKGYFWLASRPEFAGSWSQAGGVARQGLGGMWWASVPKERWPEDPESLKFIMSHWMDGIGDARQELVFIGMEMNESELRNRLESALLTDTEMAEGPLKWRHYPDPVEPWFD

SEQ ID NO: 7959 - DNA, 1239 bp, Klebsiella pneumoniae
  CDS (1)..(1239): transl_table=11
ttgattgcattaacgtttagcggcataaggctggatgctatgaaaagaacaccgctcattatccttaatggttttctgggagcaggaaaaactactctgctaaaaaaccttcttacacaggcacacaaacggcgaatggctgtatccgtcatcgttaatgacatgagtgaacttgatgtggatggcgtcctgatagccaacacagaaatcgttgatgcagccagtaacaattttgtgagtatttcagcagacagtatcagcagcagaagtgggatccagaagctggattccgcgctgaaaaacctgctcgaaaaacggtctccggattttattttactggaaacgtcaggcagcagccatcctcttcccctggtccgctatctgcgggaacacacccaggtaagtctcaaagcatttttgtctcttgtagatacggtcatgcttaatgatgactacgacggtggaaagaagcttattccggttttccaggagcacctcaataaagggacccggggagtggaaagcctgctggcagaacagattatgttctgtaataagctcttgttaaccaaaaacgacagattacccttctatgttgttactgaggtagccagagccatacatccacttaatccgcaggttgcaattatggctgtgccctggggaaatttacagctggatgaattgctttccatgccggattacgattttcatcgggtggcgttacttattgatgagcttcaggatgcaattgatgcagttttgtcggatgaacccgacaaaaaatatgatatttcgtggcgggtcattgaggatgaccgtccatttcatccgcagcggctgtgggatacctgccaccgatttatgggttccagggtttaccgcagcaaggggtttttctggctaccgggaagggatgacctggcattactgtggaaccaggccgcaggaagcatcaatctcgaattcataagctactggaaagccggggtcctgacccacactgataattcactgacaaaggaagaacgcgcagctatccatgagcaactggcaaaaatgccgggcagatttggtgaccggcgctgccgcctgactgttattggcgagagcggcgaaattgacgattttgtcctcgcgttgcgccagtgtttactcactgaagaggaaattcgctggtggcagcaggggggaattttccacgatccctggcccacgaaagtggcccggctggcttaa

SEQ ID NO: 7960 - protein, 412 aa, Klebsiella pneumoniae
MIALTFSGIRLDAMKRTPLIILNGFLGAGKTTLLKNLLTQAHKRRMAVSVIVNDMSELDVDGVLIANTEIVDAASNNFVSISADSISSRSGIQKLDSALKNLLEKRSPDFILLETSGSSHPLPLVRYLREHTQVSLKAFLSLVDTVMLNDDYDGGKKLIPVFQEHLNKGTRGVESLLAEQIMFCNKLLLTKNDRLPFYVVTEVARAIHPLNPQVAIMAVPWGNLQLDELLSMPDYDFHRVALLIDELQDAIDAVLSDEPDKKYDISWRVIEDDRPFHPQRLWDTCHRFMGSRVYRSKGFFWLPGRDDLALLWNQAAGSINLEFISYWKAGVLTHTDNSLTKEERAAIHEQLAKMPGRFGDRRCRLTVIGESGEIDDFVLALRQCLLTEEEIRWWQQGGIFHDPWPTKVARLA

SEQ ID NO: 7961 - DNA, 957 bp, Rhodopseudomonas palustris CGA009
  CDS (1)..(957): transl_table=11
atgacggcagcatccgcgaccatttcagtcacggtaatcggcggctttctcggcgcgggcaaaaccaccttcgtcaatcacctgctacgcagcggcggccctcggacggcggtgctggtcaacgatttcggcgaggtcaatgtcgacgcgacgctgatccagagtcacgacggcaccacgatgacgctgaccaatggctgcatctgctgcagcatgggcaccagcttcatcgacacgatgtgccaggtgctcgacgctgcggtgccgttcgagcggatcgtgatcgaggcctccggggtcggtgatccgtggaagatcgcggaaattgcgctgatcgaaccgtcgctgcggctcgaccgggtgatcgtgttggccgatgccagccggatcgcgcaactgatcgaggattccaaggtcggcgacaccgtgcgcggccagtttgagcgctgtgacattgtcctactgaacaagaccgatctggtgaatgccgaggctctggctgctgcgcgcaccgcggtacgaagtctgcgcccggacgtgggcatcgtcgcaaccgtgcaagacgcgatgccgacgctggcagagctagagacggctgcgtcgtcgagcggtttccgagccgacgcagtcgaggccgcggcgatcgatcacggcgccaccttcaagagctgggcgtatcgccgcgccggtcggttcgatcgcgcccggctcgcctgtgcggtcgataagctgccgccgcagctgttgcggctgaaggggtcctgtcgcctcgccggcgaagacgacgtcaaagtgtttcagatggtcgagagcgtctggagcctgtcgccggccgatgccggaccggccgagcccggcatcgtgctggtcggtgtcggcaccgccgatctgccgccgccggccgaactcgacgcgatcctcgaccgcgctttggcgccggccggagcgctgtcgtga

SEQ ID NO: 7962 - protein, 318 aa, Rhodopseudomonas palustris CGA009
MTAASATISVTVIGGFLGAGKTTFVNHLLRSGGPRTAVLVNDFGEVNVDATLIQSHDGTTMTLTNGCICCSMGTSFIDTMCQVLDAAVPFERIVIEASGVGDPWKIAEIALIEPSLRLDRVIVLADASRIAQLIEDSKVGDTVRGQFERCDIVLLNKTDLVNAEALAAARTAVRSLRPDVGIVATVQDAMPTLAELETAASSSGFRADAVEAAAIDHGATFKSWAYRRAGRFDRARLACAVDKLPPQLLRLKGSCRLAGEDDVKVFQMVESVWSLSPADAGPAEPGIVLVGVGTADLPPPAELDAILDRALAPAGALS

SEQ ID NO: 7963 - DNA, 1005 bp, Rhodopseudomonas palustris CGA009
  CDS (1)..(1005): transl_table=11
atgaccgcccgcgttcccgtcacggtgctcaccggctttctcggcgccggcaagaccacgctgctgcgtgcgctgctgaaccagtcgagcggtcgtcgcatcgcggtgatcgtcaatgaatttggcgatgccggttttgacggttcgctggtcgaggattgcggcgcgtcggtgtgcgcgccgggcgatatcgtcgaactcaccaacggctgcatctgctgcacagtggcggacgatttcattccgacgatggagaagctgctgaaccgcgacacgccgctcgacgccatcgtgatcgagacctccgggttggcgttgccgcagccgctcctgaaggcgttcgcctggccggcggtgaagacccgtgccaccgccgacggcgtcgtcaccgtggtcgacgcgctggcgctgagcgagggccgcgtgccgctcgacgatgatgcggtgaaggcgcagcgcgacgcgacgcacgatgatccgatcgaggaagtgttcgaggatcagctcgcttgcgcggatctcgtcgtgctgtcgaagagcgatttggtggatcccgagcaactcgccgctttggaagccaagctggcgagccgggtgcggccgaacgtccgcatcgtccgctcgcatggcacgctggcgccgtcggtgttgatcgggctcgatgccgaagccgaaaatgatcttgcgtcccgcatcggccatcacgccgaaggcgaggaacacgatcacgacgatttcgactcgctggtgatcaccccgcagccggcagagacgctcgacgccatgaaggcgcgcgtcggcgatgcgctcggtctcgacggcgtactccgcgtcaagggccatgcccgcgttgccgggaagccggcgccggtggtggtgcaggcggtcggctcccggatcgatctcgccttcgcccgccccgatgccgagcgtccggaccatctggtggtgatcggcctcaagggtttcgacgccgacgccgcgcggcgcgcgctggcgggatag

SEQ ID NO: 7964 - protein, 334 aa, Rhodopseudomonas palustris CGA009
MTARVPVTVLTGFLGAGKTTLLRALLNQSSGRRIAVIVNEFGDAGFDGSLVEDCGASVCAPGDIVELTNGCICCTVADDFIPTMEKLLNRDTPLDAIVIETSGLALPQPLLKAFAWPAVKTRATADGVVTVVDALALSEGRVPLDDDAVKAQRDATHDDPIEEVFEDQLACADLVVLSKSDLVDPEQLAALEAKLASRVRPNVRIVRSHGTLAPSVLIGLDAEAENDLASRIGHHAEGEEHDHDDFDSLVITPQPAETLDAMKARVGDALGLDGVLRVKGHARVAGKPAPVVVQAVGSRIDLAFARPDAERPDHLVVIGLKGFDADAARRALAG

SEQ ID NO: 7965 - DNA, 1089 bp, Rhodopseudomonas palustris CGA009
  CDS (1)..(1089): transl_table=11
gtgtttcgggccggggctccgcgctggagtaactgcctgatgacctctacggccgcttcgaagattcccgtcaccgtgctcaccggctatctcggcgccggcaagaccacgctgctcaaccgcatcctgtcggaaaaccacggcaagaaatacgcggtgatcgtcaacgaattcggtgagatcggcatcgacaacgacctcatcatcggcgccgacgaagaagtgttcgagatgaacaacggctgcgtctgctgcacggtgcgtggcgacctggtgcgcattctcgccggcctgatgaagcgcaaaggcaagttcgacgcgatcatcgtcgagaccacgggcctcgccgatccggccccggtggcgcagaccttcttcgtcgatgaagacgtgcagaacgccgcgcggctcgatgcggtggtgaccgtcgcggacgccaaatggctgagcgagcggctgaaggatgcgccggaagccaagaaccagatcgccttcgccgacgtcattgttttgaacaagaccgacctggtgagcccggccgaactcgccgaagtcgaggcgcgcattcgcgcgatcaacccctacgccaagctgcatcgcaccgagcgctgccaggtcgcgctcgccgacgtgctggagcgcggcgcgttcgatctcgatcgcatcctcgaaatcgaaccggcctttctcgaggccgacgatcacgatcaccaccatgatcacgaccacggccatcatcaccatggccacgatcatcatcacgatcacggactgaagcactatcacgacgaggacatgcaatcgctgtcgctgaagagcgacaagccgctcgatcccgccaagttcatgccgtggctgcagcaattggtgcagaccgaaggcggcaagatcctgcgctccaagggcatcctcgccttcaccggcgacgacgaccgctacgtgttccagggcgtgcatatgatgctggaaggcgatcaccagcgcgcgtggaaagagggcgagccgcgcgagagccgcgtggtgttcatcggtcgcgatctgcccgagcaggcgatccgcgacggcttcgccaagtgcatcgcgtcatga

SEQ ID NO: 7966 - protein, 362 aa, Rhodopseudomonas palustris CGA009
MFRAGAPRWSNCLMTSTAASKIPVTVLTGYLGAGKTTLLNRILSENHGKKYAVIVNEFGEIGIDNDLIIGADEEVFEMNNGCVCCTVRGDLVRILAGLMKRKGKFDAIIVETTGLADPAPVAQTFFVDEDVQNAARLDAVVTVADAKWLSERLKDAPEAKNQIAFADVIVLNKTDLVSPAELAEVEARIRAINPYAKLHRTERCQVALADVLERGAFDLDRILEIEPAFLEADDHDHHHDHDHGHHHHGHDHHHDHGLKHYHDEDMQSLSLKSDKPLDPAKFMPWLQQLVQTEGGKILRSKGILAFTGDDDRYVFQGVHMMLEGDHQRAWKEGEPRESRVVFIGRDLPEQAIRDGFAKCIAS

SEQ ID NO: 7967 - DNA, 1209 bp, Rhodopseudomonas palustris CGA009
  CDS (1)..(1209): transl_table=11
atggatcaccccctcctcccggtcaccgtgctgtccggctttctcggcgccggcaaaaccacccttctcaaccggatgctgtccaaccgcgaaggccggcggctggcggtgatcgtcaatgacatgagcgaggtgaacattgacgccgagctggtgcgccaggatggcgggttgacgcggtcggaggaaacgctggtcgagatgaccaacggctgcatctgctgcacgctgcgtgaggacctgctgctcgaagtccgcaagctcgccgagagcggccggtttgatgggttggtgatcgaatccaccggcatcgctgagccgctaccgatcgccgcgacgttcgaattccgcgacgagaacggcgccagcctgtcggatatcgcgcggctcgacaccatggtgacggtggtcgatacagccagcctgctggcgaactactccagccaggaattcctgcgcgaccgcggcgaagtcgccggcgccgacgacgagcggacgctggtcgatctgctggtcgaacagatcgaattcgccgacgtcatcgtgctcaacaaggtgtcggcgacctcgccgagccggcgcgaaacagcgcggtcgatcgtgcgagcgctgaactcggatgcgaagatcatcgaagccgatttcggcgacgtgcctctgtcgtcggtcttgcacaccggactgttcgatttcgagcgcgcgcatcagcacccgctgtggttcaaggagctgaacggcttttccgagcacgtaccggagaccgaggaatacggcatccgctcattcgtgtaccgggcgcggcggccgtttcatccgctccgcttccagtcgttctgcaaccgcagctggccgggcgtaatccgcgccaagggcttcttctggctggcgacgcgaccgcagcatgtcggtgaaatcgcgcaggccggcgcgatggtccgcacctccaagcgagggctgtggtggtcggcggtgccgaagacgcgctggccggacaatgccgactggcacgaggcgatgaagccgtatttcgatccggtgtggggcgaccgtcgccaggaaatcgtgttcatcggcaccggcgagatggacgaagcggcactgcgccgccagctcgacatgtgcctggtcggtgaagatgcacagttcacgccggatgcgtggcagaagctccccgatccgttcccgagctgggcgccggcacagaactga

SEQ ID NO: 7968 - protein, 402 aa, Rhodopseudomonas palustris CGA009
MDHPLLPVTVLSGFLGAGKTTLLNRMLSNREGRRLAVIVNDMSEVNIDAELVRQDGGLTRSEETLVEMTNGCICCTLREDLLLEVRKLAESGRFDGLVIESTGIAEPLPIAATFEFRDENGASLSDIARLDTMVTVVDTASLLANYSSQEFLRDRGEVAGADDERTLVDLLVEQIEFADVIVLNKVSATSPSRRETARSIVRALNSDAKIIEADFGDVPLSSVLHTGLFDFERAHQHPLWFKELNGFSEHVPETEEYGIRSFVYRARRPFHPLRFQSFCNRSWPGVIRAKGFFWLATRPQHVGEIAQAGAMVRTSKRGLWWSAVPKTRWPDNADWHEAMKPYFDPVWGDRRQEIVFIGTGEMDEAALRRQLDMCLVGEDAQFTPDAWQKLPDPFPSWAPAQN

SEQ ID NO: 7969 - DNA, 1188 bp, Homo sapiens
  CDS (1)..(1188)
atgttaccggctgttggatctgtggatgaggaagaggatcctgcggaggaggattgtcctgaattggttcccattgagacgacgcaaagcgaggaggaggaaaagtctggcctcggcgccaagatcccagtcacaattatcaccgggtatttaggtgctgggaagacaacacttctgaactatattttgacagagcaacatagtaaaagagtagcggtcattttaaatgaatctggggaaggaagtgcgctggagaaatccttagctgtcagccaaggtggagagctctatgaagagtggctggaacttagaaacggttgcctctgctgttcagtgaaggacaatggccttagagctattgagaatttgatgcaaaagaaggggaaatttgattacatactgttagagaccactggattagcagaccctggtgcagtggcttctatgttttgggttgatgctgaattagggagtgatatttaccttgatggtatcataactattgtggattcaaaatatggattaaaacatttaacagaagagaaacctgatggccttatcaatgaagctactaggcaagttgctttggcagatatcattctcattaataaaacagacttggttccagaagaagatgtaaagaaattaagaacgacaattagatccataaatggactaggacaaatcttagaaacacaaagatcaagagttgatctctctaatgtattagatcttcatgcctttgatagtctctctggaataagtttgcagaaaaaacttcagcatgtgccaggaacacaacctcaccttgatcagagtattgttacaatcacatttgaagtaccaggaaatgcaaaggaagaacatcttaatatgtttattcagaatctcctgtgggaaaagaatgtgagaaacaaggacaatcactgcatggaggtcataaggctgaagggattggtgtcaatcaaagacaaatcacaacaagtgattgtccagggtgtccatgagctctatgatctggaggagactccagtgagctggaaggatgacactgagagaacaaatcgattggtcctcattggcagaaatttagataaggatatccttaaacagctgtttatagctactgtgacagaaacagaaaagcagtggacaacacatttcaaagaagatcaagtttgtacataa

SEQ ID NO: 7970 - protein, 395 aa, Homo sapiens
MLPAVGSVDEEEDPAEEDCPELVPIETTQSEEEEKSGLGAKIPVTIITGYLGAGKTTLLNYILTEQHSKRVAVILNESGEGSALEKSLAVSQGGELYEEWLELRNGCLCCSVKDNGLRAIENLMQKKGKFDYILLETTGLADPGAVASMFWVDAELGSDIYLDGIITIVDSKYGLKHLTEEKPDGLINEATRQVALADIILINKTDLVPEEDVKKLRTTIRSINGLGQILETQRSRVDLSNVLDLHAFDSLSGISLQKKLQHVPGTQPHLDQSIVTITFEVPGNAKEEHLNMFIQNLLWEKNVRNKDNHCMEVIRLKGLVSIKDKSQQVIVQGVHELYDLEETPVSWKDDTERTNRLVLIGRNLDKDILKQLFIATVTETEKQWTTHFKEDQVCT

SEQ ID NO: 7971 - DNA, 1023 bp, Mycobacterium avium subsp. paratuberculosis K-10
  CDS (1)..(1023): transl_table=11
gtggagggtgaggctttggctgcgatcccggtcatcgcgctcaccggtcacctcggggccggcaagacgacactgctcaaccacctgttacgccatcccggcacgcgaatcggtgtgatagtcaacgacttcggcgacatcaacatcgacgcgggtctggttgccggccaagtcgacgagccggcttcgatcgctggcggatgcatctgctgcctgcccgacggcggtgggctcgacgaagcactcggcaagctcgcggacccggctctacgcctggatgccatcgtcgtcgaggccagcgggttggccgacccggtggcgatcgcgcggctcatcgggttcagcgaaatccgtggggtccgtccgggcgggttggtcgacgtcgtcgacgccgtgaaccacttcgacaccgtggatcgtggcccgctgccgccggtacgctacggtgcggcctcgctgatcgttgtcaacaagctcgaccaggtgcccgagcgagaacggtcggtcgtggtgcaacgcgttagagaacgtgcggcgcaacgcaatccgcgcatacatgtggtgggcacaatcggaggtcggatagccccggagctgctcttcgacgcgtccgccaggcctgagcagattgggcagctgtcctttgtggacctggtgcccgagcacgagcatgaccacgtccatgcggacgccgtcaccgcccacagcgatggctgcatcgaccccgatgccctcctcaaccttctcgaaaacccaccgccgcaggtgttccggatgaaaggcgtcgtggcggtgcggcagcgcgcgaccgtgcggaactatgtcgtcaacctggtgggtagcgcaatcgacatcgccaaggcgccgccgaaggccacggccaaccgtctggtggccatcgggatgcatctcgacgtcgccgctgtgggggcgcgactcgatcgcgcgctgcagccggtctacggtccggcgtcggggcaggcgtcgcggcggctgcagcgatacctgcggctcagcgcctga

SEQ ID NO: 7972 - protein, 340 aa, Mycobacterium avium subsp. paratuberculosis K-10
MEGEALAAIPVIALTGHLGAGKTTLLNHLLRHPGTRIGVIVNDFGDINIDAGLVAGQVDEPASIAGGCICCLPDGGGLDEALGKLADPALRLDAIVVEASGLADPVAIARLIGFSEIRGVRPGGLVDVVDAVNHFDTVDRGPLPPVRYGAASLIVVNKLDQVPERERSVVVQRVRERAAQRNPRIHVVGTIGGRIAPELLFDASARPEQIGQLSFVDLVPEHEHDHVHADAVTAHSDGCIDPDALLNLLENPPPQVFRMKGVVAVRQRATVRNYVVNLVGSAIDIAKAPPKATANRLVAIGMHLDVAAVGARLDRALQPVYGPASGQASRRLQRYLRLSA

SEQ ID NO: 7973 - DNA, 1143 bp, Mycobacterium avium subsp. paratuberculosis K-10
  CDS (1)..(1143): transl_table=11
atgccgccacagagttctacgcccctccccgtcaccgtcctatccgggttcctgggagcaggcaagaccaccctgctcaaccacgtcctggctaaccaggaaggccgccgcgtcgcggtcatcgtcaacgacatgagcgaagtgaacatcgacgcggcgctggtggccgggacgggtttcctggaccgcaccgaagagaaactggtcgaactgaccaacggatgcatctgctgcactttgcgtgaagatctcatcgaatcggtcgcccgcttggcatccgccgggcgtttcgattacctgctgatcgagtcgacaggtatctccgaaccgatgccggttgctgccagcttcagttgggaattcgagaacggattcagcctcagtcggatcgcgcgactcgacaccatggtgaccgtggtcgacgcgtcgacgtttctgcgcgagcttgcgcgcggcgaagccctggctgcccgccacctagccgccggggacggcgacgtccgcacgattgccgacctacttgtcgatcaagtggagttcgccgacgtgattctgctcaacaagaccgatctggtgagtgagaaaaccaacgcaacggtggcggcagtacttcggcgccttaatccggcggcgaagatcgtccccaccgaccacggccgggtagcgctgtcagaggtcctggacaccggtctattcgatccccaccttgcggccgaatcagccggctgggcggaggaactcgccaacgggcactcacccgagaccgaggaatacggcatcagcagtgtgactttccgcgccgcgcgccctctgcacccgcagcgattacacgtagcgctgggccagctgcagggagtgttgcgcagcaaaggcttctgctggattgccagccgaccggacattgcggccatctggtcccaagccgggcccaacctggtgatagaacccgcccagtactggtcaaccgccgactttcccgccggccaagagatcgtgttcatcggggtcaacctcgaccacagccgggtgctcgacctcatgcaggcggcgctgctgaccgacaccgaactggcccaaggtcctcagcggtgggtcggctaccccgacccgttgccaccgtgggacgtcgttcacgcccactaa

SEQ ID NO: 7974 - protein, 380 aa, Mycobacterium avium subsp. paratuberculosis K-10
MPPQSSTPLPVTVLSGFLGAGKTTLLNHVLANQEGRRVAVIVNDMSEVNIDAALVAGTGFLDRTEEKLVELTNGCICCTLREDLIESVARLASAGRFDYLLIESTGISEPMPVAASFSWEFENGFSLSRIARLDTMVTVVDASTFLRELARGEALAARHLAAGDGDVRTIADLLVDQVEFADVILLNKTDLVSEKTNATVAAVLRRLNPAAKIVPTDHGRVALSEVLDTGLFDPHLAAESAGWAEELANGHSPETEEYGISSVTFRAARPLHPQRLHVALGQLQGVLRSKGFCWIASRPDIAAIWSQAGPNLVIEPAQYWSTADFPAGQEIVFIGVNLDHSRVLDLMQAALLTDTELAQGPQRWVGYPDPLPPWDVVHAH

SEQ ID NO: 7975 - DNA, 1188 bp, Bacillus cereus ATCC 10987
  CDS (1)..(1188): transl_table=11
atgaaaaaagtacctatcactgtattgagtggttttttaggagctggaaaaaccaccttactacatcatattttgactaataagaacaacttaaaagtagctgttatcgttaatgatatgagcgaagtaaacattgatgcatcccttatcaaaaaaggtggtttttcacgtacggaggaaaaactagtagaaattcaaaatggctgtatttgttgcacactacgagaggatttaatgatagaagtgaatcggcttgtagaaaacggtgatattgactatatagttattgaatcttccggtataagtgagccgattccagttgcccaaacgtttacgtatacagacgatgttctgaacattgacttaacaaaaaattgtcgcctcgatacgatggttactgttgtagatgcaaatagattttgggatgattttgcagatggtgaaagtttattagaccgtaagcaggcaattgatgaaaacgatactcgggaagttattgatttattaatagatcaaattgagtttgcaaatgtaattctccttaataaaatagacctactagaaaaagaagatgtgagagagctccatcatttacttaagaaattaaatcctagtgcaaaaattattgaaacttcatttagcaacgtaccactgcaagaaattttgaatacaaacttattcaattatgaggaagcgagtcaatcggcgggttggatacaagaattaaatagtgaacatcatacacctgaaactgaagaatatggcatcaattcctttgtgtatcgccgtaaatatcctttccatcctgaacgccttatgaattggctagaaaaatggcctgtggatgtcgtaagagcaaaaggctttttctggctcgcatcacgtaataatatgatagggcttctatctcaagcgggttcctctattacaattcaaggagccggtgaatggatagcagcattacctgaaactgaaagaaatcaaattattacagaagaacccgaggtattgaaaagctggaacgagcgatatggagatcgaataaccgaactcgtatttatcggaattgatatgaaccgttctttaattgaacaatcattagatgattgtctattaacagaaaaagaaatggcacaaaactgggatacattcattgatcctattccagcttttacttacacttcataa

SEQ ID NO: 7976 - protein, 395 aa, Bacillus cereus ATCC 10987
MKKVPITVLSGFLGAGKTTLLHHILTNKNNLKVAVIVNDMSEVNIDASLIKKGGFSRTEEKLVEIQNGCICCTLREDLMIEVNRLVENGDIDYIVIESSGISEPIPVAQTFTYTDDVLNIDLTKNCRLDTMVTVVDANRFWDDFADGESLLDRKQAIDENDTREVIDLLIDQIEFANVILLNKIDLLEKEDVRELHHLLKKLNPSAKIIETSFSNVPLQEILNTNLFNYEEASQSAGWIQELNSEHHTPETEEYGINSFVYRRKYPFHPERLMNWLEKWPVDVVRAKGFFWLASRNNMIGLLSQAGSSITIQGAGEWIAALPETERNQIITEEPEVLKSWNERYGDRITELVFIGIDMNRSLIEQSLDDCLLTEKEMAQNWDTFIDPIPAFTYTS

SEQ ID NO: 7977 - DNA, 957 bp, Bacillus cereus ATCC 10987
  CDS (1)..(957): transl_table=11
ttgaatacgtttgaaataaagaaatggatggtcgatcaaatgaataaagtagaaattcatatattaggtggctttttaggtagtggaaaatcaacgctattacaaaatttattgttagcggagaaaaagaagaatagaaaagttgcagtattgatgaatgaaattggtgaatactcggtagataccgatattattggaaaagagaatgttttaagggaacttctgaaaggatgtatttgttgtacgttaaaagaagagcttgaaatacagttgcattcgttatatcagcaagaaagaccagatgtcatttatatagaaacgacaggtgttgcgcatccaattgaagtgttagatgcatgtgtatcaccaattttagcacctttcttagaagtgaaatccattgtagtcgttttagatgcagtaagatggttaaatcgaagtgtattaagtgcaaacgttcagcaattattgcatgagcaactgaagtttggtagtcacattttaattaataaatcagatttactaacaggtgcggataagaacaaagtaatagaagaagtgaaagtgataaataatcatgcgaaattgtttgaaacaaaatattgtaatatatctttagaagacatagaagaagctgaatttacgaatgacgcggaacatgagacactacatgtaaaacagcatttacatatacaaacgatgacgtatcaatttacgaaatcgattgatcaagataaattatacgaatggctttcaaatttaccagatagtatttatcgcgtaaaaggttttgtgaaatttcatggggacaaatatcctcacttattccaatactcgttcggagtaccgactttactggaacaagacttcggtttcccaacgaacttagtagtaataggggaagggctagataagaagcaattggctgaagggttagaggaagtggaaaataattaa

SEQ ID NO: 7978 - protein, 318 aa, Bacillus cereus ATCC 10987
MNTFEIKKWMVDQMNKVEIHILGGFLGSGKSTLLQNLLLAEKKKNRKVAVLMNEIGEYSVDTDIIGKENVLRELLKGCICCTLKEELEIQLHSLYQQERPDVIYIETTGVAHPIEVLDACVSPILAPFLEVKSIVVVLDAVRWLNRSVLSANVQQLLHEQLKFGSHILINKSDLLTGADKNKVIEEVKVINNHAKLFETKYCNISLEDIEEAEFTNDAEHETLHVKQHLHIQTMTYQFTKSIDQDKLYEWLSNLPDSIYRVKGFVKFHGDKYPHLFQYSFGVPTLLEQDFGFPTNLVVIGEGLDKKQLAEGLEEVENN

SEQ ID NO: 7979 - DNA, 951 bp, Bacillus cereus ATCC 10987
  CDS (1)..(951): transl_table=11
atgattccagtaacaatattaactggttttcttggatcagggaaaacgacattattaaatcgtattttatcagagaatcacggtcagaaattagcggtgatcgtaaatgaaatcgggcaaattggtattgataatcagttgattatgaatgttgaagaagaaattatggaaatgacaaacggctgtttgtgctgtactgtacgtgaggatttactcgttgcgttaaaacaattactggacgtaaaagcagaagggaaaatggactttgatggattagtaattgaaacgactggtcttgcaaatccaggtcctattattcaaacattctttttagatcctgttattcaatctgcataccaaattaacggtgttgtaacagtagtagacagttatcatatatataaacattttgaaaaagggctagaagcaaaagaacaaattgcatttgctgatgttgtattagtgaataagttagatttaattgaagagagtgaaaaagaaaatctcttacatgaacttcaaggaataaacccgactgcaaagttaattcagtcgactaattgtgatgtggatattccatcgttactacaaattcaaacgtttaaaacgaaagatacgttacaaatttatcctcatacagagcataatcatttagaaggtgtaaaatcgtttgtactacgcgaagagcgtccgttagatttacaaaaactaaatgagtggatgtcagctgtcgttcaagaactaggagaatatttatatcgctacaaaggaattttatcgattgatggagtggataaacgtatcgttttccaaggcgtacatacgttatttgctgcttcgtatgatagagagtggcaagagggcgaagatcgagtaagtgaagttgttttcatcggaaaagatattaataaagaatggttccaagcacattttgaggagtgtgtgaaataa

SEQ ID NO: 7980 - protein, 316 aa, Bacillus cereus ATCC 10987
MIPVTILTGFLGSGKTTLLNRILSENHGQKLAVIVNEIGQIGIDNQLIMNVEEEIMEMTNGCLCCTVREDLLVALKQLLDVKAEGKMDFDGLVIETTGLANPGPIIQTFFLDPVIQSAYQINGVVTVVDSYHIYKHFEKGLEAKEQIAFADVVLVNKLDLIEESEKENLLHELQGINPTAKLIQSTNCDVDIPSLLQIQTFKTKDTLQIYPHTEHNHLEGVKSFVLREERPLDLQKLNEWMSAVVQELGEYLYRYKGILSIDGVDKRIVFQGVHTLFAASYDREWQEGEDRVSEVVFIGKDINKEWFQAHFEECVK

SEQ ID NO: 7981 - DNA, 1233 bp, Eremothecium gossypii
  CDS (1)..(1233)
atgccactgaaaaacttccaatatagggaagacgaggatggcgagctgccaccgctagttactgggttggaggaaaacatacaggagcttttgtcagaacttaagcccgatggagggttgaatatagtaaatgaacgcaagatagaacaagcgaataagcagcatcaaggggctggaagtcagaagaagataccagtaaccgttattacgggctacctgggttcaggcaaatctacgctgctggaggagataacaaagcgagggtctgacatgaggatagcagtgatattgaatgaattcggtgattcgtccgagattgaaaagtccctaacaatcaaaaacaacgggaaggcgtacgaggaatggctggacctgggtaatgggtgcctatgttgcagtctgaaggacgtaggggtgaaggccatcgaggcgatggtttcgcggtcgccaggtaaaatcgactacatcatacttgagacaagcgggatagcggacccagtgccgatcgtgaagatgttctggcaggatgagggtctcaatagctgcatctacattgatgggattgtgacggtgctggacgcagagcatgtgatgacatggctcgacgaggtggcccctccgcgccaatggcgcggcgaccaggtgctgatggaaaaccagatgaccgtggcgcatctgcagctggccatggcggacgcggtggtgctgaataaaatcgaccggctggaaggccttgatgacgaaatcgctgtggtggaggaaaaagtgcgtagcattaatgcagtcgcgcccatctatcggaccaagttcggcgatctggagataaacaaggtactgaatctccatgcttttggtgcctctgacattcccgatgcccacgtggcttaccatgatccgcggctgtccacggtcaccttgacctgccggccgctgcgcgacaaggctgagctcgagtggttcgaagaacactttctacaagctcttctttggaaggacttcggccggggtgagctgacacaggggcaggagttcgagattcaccgcaccaaagccctgctcttggtcggatcagaattcaagatagtacagggtgtgcgcgacacctacgaagtcttgcggggcgaacccgtacccggtgtgaaacagtgcaaactagtcttcattggcgtgcacctggacaagcaatatattcagggcattatggaatcagcgctcaatgcacgtatagagtag

SEQ ID NO: 7982 - protein, 410 aa, Eremothecium gossypii
MPLKNFQYREDEDGELPPLVTGLEENIQELLSELKPDGGLNIVNERKIEQANKQHQGAGSQKKIPVTVITGYLGSGKSTLLEEITKRGSDMRIAVILNEFGDSSEIEKSLTIKNNGKAYEEWLDLGNGCLCCSLKDVGVKAIEAMVSRSPGKIDYIILETSGIADPVPIVKMFWQDEGLNSCIYIDGIVTVLDAEHVMTWLDEVAPPRQWRGDQVLMENQMTVAHLQLAMADAVVLNKIDRLEGLDDEIAVVEEKVRSINAVAPIYRTKFGDLEINKVLNLHAFGASDIPDAHVAYHDPRLSTVTLTCRPLRDKAELEWFEEHFLQALLWKDFGRGELTQGQEFEIHRTKALLLVGSEFKIVQGVRDTYEVLRGEPVPGVKQCKLVFIGVHLDKQYIQGIMESALNARIE

SEQ ID NO: 7983 - DNA, 909 bp, Methanococcus maripaludis S2
  CDS (1)..(909): transl_table=11
gtggttaaaatcgacgttgtatctggctacttgggttctggaaagacgacatttataaaacatcttttaaacgcctgtggaaatgaaaaagtaattgttattgaaaatgaatttggcgaaattgcaattgacggagatcttatcaaaaatgaaggatttgaagtttatgaacttcaacaagggtgcatttgctgtagcattaggtctaactttatcgaagcgttaggcaaaatcgtagatgaatttgaacctgacaggattattgttgaaccaacaggaatggggcttttaagtgaaataattggaatattgagtattccaaaaattaagcaaatttcagaaataaattcacttacaaccgtggtagatgctgaaaattatctcgaagaagttgaaggatttggcgaattttttaaagatcagataaaaaatgcagaccggctgattatcagtaaagctcagtttatgaattaccaagaaattgataaaattctctcatcattaagggagttaaatcctaattcattaattgtaactcaaaactgggaatttatggctccagaagaatttttgaaaattcttgacaacagttctgaaaattctggtaaaatatatcgtggaaacgttgaagctgcaatgaaaggcgtatcaagtattgggcttgaatttacggaatcttttaaagaaaaagacattgaaaatataattttagaacttaaaagtggaaaatacgggcaaataatgcgtggaaagggttttttaaatatcgatgataaaacaatggaatttaattatgttggaaatgattgcaagttggagcttttaaacacgaaaaaagaccaaaaaatttgcataattggaaaaaatcttgaaaaagaagcagtaagtgaattatttaataatttataa

SEQ ID NO: 7984 - protein, 302 aa, Methanococcus maripaludis S2
MVKIDVVSGYLGSGKTTFIKHLLNACGNEKVIVIENEFGEIAIDGDLIKNEGFEVYELQQGCICCSIRSNFIEALGKIVDEFEPDRIIVEPTGMGLLSEIIGILSIPKIKQISEINSLTTVVDAENYLEEVEGFGEFFKDQIKNADRLIISKAQFMNYQEIDKILSSLRELNPNSLIVTQNWEFMAPEEFLKILDNSSENSGKIYRGNVEAAMKGVSSIGLEFTESFKEKDIENIILELKSGKYGQIMRGKGFLNIDDKTMEFNYVGNDCKLELLNTKKDQKICIIGKNLEKEAVSELFNNL

SEQ ID NO: 7985 - DNA, 1101 bp, Danio rerio
  CDS (1)..(1101)
atggaggatgaggatgaatgtccagagttagttcctatcaaggagaagcccagtggacccacagctcagatcccggttaccattattactggatacttgggtgcaggaaagacaactcttttgaactacatattaaccgaacaacataataagcgaatagctgtcatactcaatgaatttggggaagggagcgctctagaaaaatctctagctgtgagtcaggcaggagagctgtatgaagagtggctggagctgaggaacggctgcctgtgctgctctgtcaaagataatggcttaaaagctattgaaaatctaatggagaagaaaggaaagtttgactacatccttctagaaacaaccggattggccgatccaggagctgttgcctcaatgttctgggttgatgctgaattaggaagtgatgtttacctggacggtattgttaccgttatagatgctaaatatgggttgcagcatctaacagaagaaaagcctgagggtcttatcaatgaagctgccagacagattgctctcgctgatctgaccatcatcaacaagactgatctggtgcatgagacggagctgctgaagctcagagatacagtgagatcaataaatggacttgtaaagattttggagacacaaaagtccagggttgatctatctgaagtattagacttgcattcttttgacactaaagatggtgaaaggttaaccaaaaagctgcagctggtaaaaacaagccaacctcacctagacaagagtatgctgactataacatttgaagtacctggcagtgtgtcagaagatcttttaaatatatttattcaggaacttctttgggaaaaaacatttaagaacaaagcaggattgccaatgacagttattcggttaaaggggatcctctcgctccagcagaagcagaagaaggtgatgttgcagggtgtccatgaactttatgagctggaagagactccagagttttgggcagatcaagagccaagactcaaccgtctcgtctttataggtcgaaaccttgatggtgagattctaaagaaagagttcatctccgctgtgtcaaataaagacagcgtcgagtag

SEQ ID NO: 7986 - protein, 366 aa, Danio rerio
MEDEDECPELVPIKEKPSGPTAQIPVTIITGYLGAGKTTLLNYILTEQHNKRIAVILNEFGEGSALEKSLAVSQAGELYEEWLELRNGCLCCSVKDNGLKAIENLMEKKGKFDYILLETTGLADPGAVASMFWVDAELGSDVYLDGIVTVIDAKYGLQHLTEEKPEGLINEAARQIALADLTIINKTDLVHETELLKLRDTVRSINGLVKILETQKSRVDLSEVLDLHSFDTKDGERLTKKLQLVKTSQPHLDKSMLTITFEVPGSVSEDLLNIFIQELLWEKTFKNKAGLPMTVIRLKGILSLQQKQKKVMLQGVHELYELEETPEFWADQEPRLNRLVFIGRNLDGEILKKEFISAVSNKDSVE

SEQ ID NO: 7987 - DNA, 1125 bp, Magnaporthe grisea 70-15
  CDS (1)..(1125)
atggattcactcgatgatgaacttcctcccgatctcgttgatacgagtaattctctcaccgaagatgaaaagccaatcaaggtgccaataacaatagtcactggctatcttggtgctggaaagacaactttgctcaactatatcctcacggcagagcatggcaagaaaattgcggttattatgaatgagtttggtgattctttggacatcgaaaagtcgctcactattaacaaggatggggagtccgtcgaggaatggatggaagttggcaatggttgcatctgttgctcagtaaaagatactggtgtggctgccatcgagtctttgatggaaaagaagggcaagtttgactacatattattggagacgactgggttagcagatcctggtaacctcgcacccctgttctgggtcgacgagggacttagcagcaccatatatctggacggcattgtcaccttggttgatgccaaaaacatcctccgcagcctggatgatccatctggcaaagtcgaaggtcacgacgaaagcgatgctcacgggccagtcatgacgactgcgcatgtgcagatatcgcacgccgacgttatcgtcatcaacaagtccgatctggtgtctgatgaggagctagaaaccgtcaaggccaggatacaatccatcaatggtcttgccaagctgcatattacaaaacagagcatcgttcccaagctcgagggtttcttgcttgacctgcacgcctacgacagcgtagaaggcctggattcggcttctgcaaaaggccacagccatctagatccgacgatctcgacactgtcgatcccgataacaaaccttgaatctagtcaagtgagcaaggtagacgggtggctgaggtctgttctctgggacaacaaactacccggcgacgaagctcaaggcaagacaccgttcgagatacatcgtgtgaaaggccgactggaactctcaagtggagagatcaaactgatacagggtgtacgagagctctttgagatatttgacgggcctcgggaagcagcagagtcgcatggcggcaaggtaatcctgattggcaggcacttgcaacagtttgactttgccgaaagcttgagggcgtctcttagctga

SEQ ID NO: 7988 - protein, 374 aa, Magnaporthe grisea 70-15
MDSLDDELPPDLVDTSNSLTEDEKPIKVPITIVTGYLGAGKTTLLNYILTAEHGKKIAVIMNEFGDSLDIEKSLTINKDGESVEEWMEVGNGCICCSVKDTGVAAIESLMEKKGKFDYILLETTGLADPGNLAPLFWVDEGLSSTIYLDGIVTLVDAKNILRSLDDPSGKVEGHDESDAHGPVMTTAHVQISHADVIVINKSDLVSDEELETVKARIQSINGLAKLHITKQSIVPKLEGFLLDLHAYDSVEGLDSASAKGHSHLDPTISTLSIPITNLESSQVSKVDGWLRSVLWDNKLPGDEAQGKTPFEIHRVKGRLELSSGEIKLIQGVRELFEIFDGPREAAESHGGKVILIGRHLQQFDFAESLRASLS

SEQ ID NO: 7989 - DNA, 1299 bp, Candida glabrata CBS138
  CDS (1)..(1299)
atgtcgctgaagaattacaagcacgatgaagatgatggcgagttgccgccgctagttacagggcgtgagtccaatctcgctgagattctggggaaagtgcggaacgatgggggccacaatttggtgagtgctgataaagtagataggtctaacaagcaggtcgaggtgcctttgagttctaatagtggcattcaaacagaaaaaaagaggattcctgtgactataattaccggttatttgggcagtggtaagtctacgttgcttgagaagatagcactaaagggctcagacaggaagatagctgtgatattgaatgagtttggggacagtagtgagatagaaaaggctatgactattcaaaatggagattctaagtaccaggagtggttagacctgggcaatggttgtctatgttgctccttgaagaatattggtgttaaggccatcgaggatatgatcgagagatcacctgggtccattgattatattctgctagagacgtctggtattgctgatcctgcaccaatagcgaaaatgttctggcaagacgaaggactcaatagtagtgtgtacattgacggaataattacggtgctagacgcagaacacattgtaaaatgtttggacgatgtgtcaccagacgcgcattggtacaaccagagtgtggttaaagaagagaacctaactattgcttactttcagatagctatggccgaccgcatcctgctaaataaagtagataagattgagggtaaaagagtttcgatcagtgatattgaagctagaataaaagacatcaatggtgtcgcgccaatataccatacacagtatggtgaagtctctttagataaattgcttgacttacatgcttatgaaggcacagacctaaatttggatggcagttttaaggatagaattctccaaaatgagaaggtcatgcatgatcatagaatgggtaccgtcactttatctttcaggccacttaaaacagaacaggagtttgagaattttaagagaaatttcttacagaaattattgtggaagaattttggtcttagcgatgacgatgagattaagaacttgagtaaactatcagacgattgggaaattgagaggtctaagggtcttgtcttggttgcagatagcacttatgtgattcaaggtgttagagatacctttgatatctttacagggcattcagatgataccataagtgactgtaagttggtgttaataggtaaataccttgacaaggacagtattcaaaagctcttgttgagagtgattgattccaagtaa

SEQ ID NO: 7990 - protein, 432 aa, Candida glabrata CBS138
MSLKNYKHDEDDGELPPLVTGRESNLAEILGKVRNDGGHNLVSADKVDRSNKQVEVPLSSNSGIQTEKKRIPVTIITGYLGSGKSTLLEKIALKGSDRKIAVILNEFGDSSEIEKAMTIQNGDSKYQEWLDLGNGCLCCSLKNIGVKAIEDMIERSPGSIDYILLETSGIADPAPIAKMFWQDEGLNSSVYIDGIITVLDAEHIVKCLDDVSPDAHWYNQSVVKEENLTIAYFQIAMADRILLNKVDKIEGKRVSISDIEARIKDINGVAPIYHTQYGEVSLDKLLDLHAYEGTDLNLDGSFKDRILQNEKVMHDHRMGTVTLSFRPLKTEQEFENFKRNFLQKLLWKNFGLSDDDEIKNLSKLSDDWEIERSKGLVLVADSTYVIQGVRDTFDIFTGHSDDTISDCKLVLIGKYLDKDSIQKLLLRVIDSK

SEQ ID NO: 7991 - DNA, 1269 bp, Kluyveromyces lactis NRRL Y-1140
  CDS (1)..(1269)
atgtcggcacttaaggattttagtttcaaagaagatgaagatggagaacttcccgttcttgttactgggaatgaacctgatttaaagaaaatattggacacatataaaccagatggtgggaaacacattgtgagcgataaaaagatcgctttggctaatagacagttggacgaggattttgatagacagcagcggattcctgtcaccatcataaccggatatcttggtgctggtaaatcaactctattggaacaaatagcgttaaagggctccaataaaaggttagcagttatattgaacgaatttggggatagttcagaaattgaaaagtctattaccatcaagaacaagggtgaagtatatgaagaatggttagatttgggtaacggttgcttatgttgttctttgaaggatgttggtgtaaaagcgatcgaagatatggttgcccgatctccaggtaaaattgattacattttattggaaacatcgggtattgcagaccccggacccatagcaaagatgttttggcaagataaaggcttgaacagcaacgtatacattgatggaattataactgttcttgatagtgaacatattataacttgtcttgatgatatttctcctactgcccattggcatggagagaaagttacggttgatgatgaatcaaaaacaaccattgcacatctacaaatagctatggccgatgcaatcttagttaacaaatcggataaaattgaaggagatgaatcaaagaaatatgacctagaaaacgttgttcgctccatcaacacagtagcaccgatatattatacgaaattcggggatatcaatttggatctcgtattggatttaaacgcattcgaaagtaccaagtttctacagaaagactacacaactacttttcatgatcatagaatatcaacgattactttagctttcccctttttccaaacagaagatcagcttgatacttttatcaaagatttccttcaagtcttgttatggaaagattttggggtagatactggttcaggcttgcagtcagctcaccatgagaatcccgatttcgaagtgcacagaactaagggtgtgataatggttggaaatgaatgcaaggtcattcaaggagtgcgtgacacatatgatataatccctggtgaaaagctgcctaacattaccgagaataaaattgtcctgatcgggaaacatttggatgagaattatattaggcacttgcttaataaagcaataagtagtcagaaataa

SEQ ID NO: 7992 - protein, 422 aa, Kluyveromyces lactis NRRL Y-1140
MSALKDFSFKEDEDGELPVLVTGNEPDLKKILDTYKPDGGKHIVSDKKIALANRQLDEDFDRQQRIPVTIITGYLGAGKSTLLEQIALKGSNKRLAVILNEFGDSSEIEKSITIKNKGEVYEEWLDLGNGCLCCSLKDVGVKAIEDMVARSPGKIDYILLETSGIADPGPIAKMFWQDKGLNSNVYIDGIITVLDSEHIITCLDDISPTAHWHGEKVTVDDESKTTIAHLQIAMADAILVNKSDKIEGDESKKYDLENVVRSINTVAPIYYTKFGDINLDLVLDLNAFESTKFLQKDYTTTFHDHRISTITLAFPFFQTEDQLDTFIKDFLQVLLWKDFGVDTGSGLQSAHHENPDFEVHRTKGVIMVGNECKVIQGVRDTYDIIPGEKLPNITENKIVLIGKHLDENYIRHLLNKAISSQK

SEQ ID NO: 7993 - DNA, 1281 bp, Debaryomyces hansenii CBS767
  CDS (1)..(1281)
atggatgatataccagacttggttgaggaattgcctgataacggtaatcagtttgctaaaggatcgaatgataataaacttggagcggtaggtaaatcggcttcaccgcctgtgaagcaagtaaaggaacttgatatcactgatgagaagacgaaaatcccaattacaattatcaccggatatttaggttctggtaaatcgacgctcttggagatgattgggaaaagctcaaagaagaggttggcgataattttaaacgagtttggggactcatcagcaatcgaaaaggctatcacggtcaaggatactgaaaataatgaatcggttcaagaatggctcgacttgggtaatggatgcctttgttgtacagtaaaggataatggtgttcttgctatagagcagttaattgaaaactccagaggaaaaattgattatattttgttagaaactacaggaatcgctgatccggctccaatagccaagatgttttggatggatgaagggctatcatctaatgtttatatagatggagttattacggtcttggacgcacaaaacattcttaaatgtttggacgatgttggtggacattggcatagagcgaataagcacttaaaagtaagtcagagtgttaatgctgatgatcttacggaggaggaactcgaagatgagagaaaaaaactagatgagggcttgaccacggctcatttacagattgcccttgcggatacaatcttaataaacaaagtggatacattggaaaaagaatcatatgaccatagaatcaaagctattgtggataaagttaaaggaattaactccagcacacctattcatacaacaagctttggtgatatcgatcttgcaaagatcttagatttgcatgcatttgaggcaaacactgaaaagttaacagaatcgataaattatatgaacagctcgacctatcatgatgacagaatcgccactgtgaccataacatttccttttttcgaaaacggcgaattcaataaggtggagtcttttcttcaatatgtgctctgggaaaacacagctaacaacaatcctatcgaaattcatagaaccaagggaattttggtgaacaaaagcaaaaacgaacaacttgatgtaagagtgatccaaggtgttagggatacgtatgatatcattgaaggtggtagactagtcgatggaatcactcaaaataaactagtattcatcggtaagaatttgacccatgatgatttatatactgaattacaagcatacttgagaaagtag

SEQ ID NO: 7994 - protein, 426 aa, Debaryomyces hansenii CBS767
MDDIPDLVEELPDNGNQFAKGSNDNKLGAVGKSASPPVKQVKELDITDEKTKIPITIITGYLGSGKSTLLEMIGKSSKKRLAIILNEFGDSSAIEKAITVKDTENNESVQEWLDLGNGCLCCTVKDNGVLAIEQLIENSRGKIDYILLETTGIADPAPIAKMFWMDEGLSSNVYIDGVITVLDAQNILKCLDDVGGHWHRANKHLKVSQSVNADDLTEEELEDERKKLDEGLTTAHLQIALADTILINKVDTLEKESYDHRIKAIVDKVKGINSSTPIHTTSFGDIDLAKILDLHAFEANTEKLTESINYMNSSTYHDDRIATVTITFPFFENGEFNKVESFLQYVLWENTANNNPIEIHRTKGILVNKSKNEQLDVRVIQGVRDTYDIIEGGRLVDGITQNKLVFIGKNLTHDDLYTELQAYLRK

SEQ ID NO: 7995 - DNA, 1245 bp, Yarrowia lipolytica CLIB99
  CDS (1)..(1245)
atggcttcgacggacgaaaagaaggtcgctaagaccattaacgacacaaagacagacgcaactgtccccacaacaagagctgacgaagacgacgacgaaatcccaatgcttgtttcgggacctcctcctactggcatgttccagacccagagtgaacaccactacagcacattcgacgtgccccaggtcgaagaccgtgtgcccatcaccatcatcaccggctatctgggctcaggcaaaagtacactgctcaatttcctcagcaaacagaaggaaaagaagatcgccatcattctgaacgagtttggagactcggccgaggtggagagatcccttactgtcactcaagacggtcagatctttgaggaatggctcgagctcgacaacggctgtctgtgttgcacagtcaaagattcgggggtggcggccatcgagaacctcatgaccaagaagggcaactttgatctcatcatgctggagaccaccggagttgcggatccaggccctattgctaacatgttctggctggactctgcgcttgcatcttccatctacctcgacggaattgtgactgtgctggacgcaaccaacatcgtaaagtgtctggatgacgtgactgtcgacgatgcacatcatggggagaacaaggagcttcaaccgctatcgacagcctgcatccagatcgcccacgccgacattcttattctaaacaaggtcgacaagattggctctgccgaagagctcgaatatatcaagaacagaatcaaaggtatcaacggcctggcaccgatcatcgagaccacctatggacagattgagctgccgaaaatcctcaacctcaaggcctacgaagaaaaagtgaaccttgagcacgcacattctcacgatcacggatggcatgaccacagaatcaccactgtttccgttggttttcctcctgtttcgctgcagcaggctgaacagctcgagagctatatccagcaggccacctgggacaaccagttattgggagtgcccgtcgagatccacagaacaaagggtaagctggtagacaccaacggaaacgtccgagtgatccagggtgttcgagatacttatgatgttatggataccagtcaggtggagaatctgtcagaagttggacataagcatccttccaagctcgtcttcattggaaagaacctcagtaagcagctcgttctcgagagctttgcccgtttcatgggcattacagatattatttaa

SEQ ID NO: 7996 - protein, 414 aa, Yarrowia lipolytica CLIB99
MASTDEKKVAKTINDTKTDATVPTTRADEDDDEIPMLVSGPPPTGMFQTQSEHHYSTFDVPQVEDRVPITIITGYLGSGKSTLLNFLSKQKEKKIAIILNEFGDSAEVERSLTVTQDGQIFEEWLELDNGCLCCTVKDSGVAAIENLMTKKGNFDLIMLETTGVADPGPIANMFWLDSALASSIYLDGIVTVLDATNIVKCLDDVTVDDAHHGENKELQPLSTACIQIAHADILILNKVDKIGSAEELEYIKNRIKGINGLAPIIETTYGQIELPKILNLKAYEEKVNLEHAHSHDHGWHDHRITTVSVGFPPVSLQQAEQLESYIQQATWDNQLLGVPVEIHRTKGKLVDTNGNVRVIQGVRDTYDVMDTSQVENLSEVGHKHPSKLVFIGKNLSKQLVLESFARFMGITDII

SEQ ID NO: 7997 - DNA, 1626 bp, Canis familiaris
  CDS (1)..(1626)
atgcccatgtatggctcagttgaggaatcactacaaataggtccagacttaactgcagaaagccaggacttgaaatcgctggacgcagaacttgaagccattgcttctcagcaaactcacgctggtcaggctgcccacgcagcaggtagcagcgggactgcgcaccgcgacagcatcaggcctggagtcctaacagctccgcccgctgcgctcaggttcggaggacacgcccagggggtgtgtccagcgcctccggggggcgtggctaagaggcgaggaggcgggcctcggcgggccccaggtaatcggggcgggatcgcgaggcgccgcgcgtcgcagcgtgatgacgtcaagcgcgcccggcgtggcgcttccggcgtgcgcagccgcgttgtcggcgtcctggtcgcggaggggcgtgctgtgcgcttggcggggatgttcccggctgtgggtgctgtggatgaggaagaggagccggcggaggaggactgcccggaattggtccccattgagacgaagctaagagaggaggaggaaaagtctggccccggcgctaagatcccagtcacaatcatcaccgggtatttaggtgctggaaagacaacacttctgaactatatcttgacagagcaacatagtaagagagtggcggttattctaaatgaatttggggaaggaagtgcagtggagaaatccttagctgtcagccaaggcggagagctctatgaagaatggctggaacttagaaacggttgcctctgctgttcagtaaaggacaatggccttagagctattgagaatttgatgcagaagaaggggaaatttgattacatactattagagaccactgggttagcagatcctggtgctgtagcttctatgttttgggttgatgctgaattaggggttgatatttatcttgatggtatcataactgttgtggattcaaaatatggattaaaacatttagaagaagaaaaacctgatggccttatcaatgaagcttccaggcaagtcgctttggcagatatcatcatcattaataaaacagacttggtttcagaagaggatttaagcaaattaagagcagccattagatcaataaatggactgggaaaaattttagaaacacaaagatcaagagttgacctctctaatgtattagatcttcatgcctttgacagcctttctggaataagtttgcagaaaaaacttcagcatgtgccaacaacacagcctcaccttgatcagagcattattacggtgacatttgaagtaccaggaaatgcaaaggaagaaagtctgaatgtatttattcagaatcttctgtgggagaagaatataagaaacaaggatgatgactgcatggaggtcatacggctaaaggggctggtgtcgatcaaagacaaagcaaagcaggtgattgtccagggtgtccatgagctctatgatctggaggagactccactgagctggaaagatgacaccgagagaacaaatcgattggttcttattggcaggaatttagataaggagatcctaaggcaactgtttgtagctactgtgactgaagcagagaagcggtggacaacacatttcaaagaagatcaagtttgcctataa

SEQ ID NO: 7998 - protein, 541 aa, Canis familiaris
MPMYGSVEESLQIGPDLTAESQDLKSLDAELEAIASQQTHAGQAAHAAGSSGTAHRDSIRPGVLTAPPAALRFGGHAQGVCPAPPGGVAKRRGGGPRRAPGNRGGIARRRASQRDDVKRARRGASGVRSRVVGVLVAEGRAVRLAGMFPAVGAVDEEEEPAEEDCPELVPIETKLREEEEKSGPGAKIPVTIITGYLGAGKTTLLNYILTEQHSKRVAVILNEFGEGSAVEKSLAVSQGGELYEEWLELRNGCLCCSVKDNGLRAIENLMQKKGKFDYILLETTGLADPGAVASMFWVDAELGVDIYLDGIITVVDSKYGLKHLEEEKPDGLINEASRQVALADIIIINKTDLVSEEDLSKLRAAIRSINGLGKILETQRSRVDLSNVLDLHAFDSLSGISLQKKLQHVPTTQPHLDQSIITVTFEVPGNAKEESLNVFIQNLLWEKNIRNKDDDCMEVIRLKGLVSIKDKAKQVIVQGVHELYDLEETPLSWKDDTERTNRLVLIGRNLDKEILRQLFVATVTEAEKRWTTHFKEDQVCL

SEQ ID NO: 7999 - DNA, 1128 bp, Candida albicans SC5314
  CDS (1)..(1128): transl_table=12
atggatgaaattcctgaactagttacagaactccctgaaaatggtgttattaaaactgaaaaagtcccagctgccccctttgttccttcttccctgacaccaacagcattggccaaaaaaataccaattactattgttactggatacttgggttctggaaagtcgactttattgcaaaatatcgggaaaactgcaaacaagcgactagcaataattcttaatgaatttggagattcctcggttatagaaaagtcggtgacaattcaagatcaagatgatagtgttcaggaatggttggacattggcaatggctgtctttgttgcactgtgaaagataatggtgttactgcgattgaaaacttgattgaaaattctaaggataaaatagattatattttattggagaccacaggtgtagcggatcctgccccaattgccaaaatgttttggttggatgaagggttggcatcaaatatatacatagacggagttgtaacagtggttgatgccgaacatataaccaaatgtttggacgatgtgggagggcattggcataaagagagtttaggggaggacgttgagtttgaggacggaataactacggcacacttgcaacttgccttggcggatgttatattattaaacaaaattgataaagtgtctgacacccagcccatgacccaaagaatcagacagataaatcaaacctcccctatacatacaactagttttggagatattgaaatttctaagattttggatcttcatgcatttgacgttgacgcaaaattgactacttctgaaacatcatttcacgatgacaggataagtacagttaccataacttttccatttttggaaaatgaagaagggttttccaaagtggaaaactttttgcagcatgttctttgggataatttggtaaatggcaaaaatgtagaagttcatcgtatgaagggtcttttagttcatgggaatgatgtgagagtggtacagggtgtacgagatacatatgaaatcatagaaaatggtaagttgttggaagaagtcaaggagaataaattagtgtttattggtaaaaacttgcatcgtccggatttgcaagaagagctaagtaagtttttataa

SEQ ID NO: 8000 - protein, 375 aa, Candida albicans SC5314
MDEIPELVTELPENGVIKTEKVPAAPFVPSSSTPTALAKKIPITIVTGYLGSGKSTLLQNIGKTANKRLAIILNEFGDSSVIEKSVTIQDQDDSVQEWLDIGNGCLCCTVKDNGVTAIENLIENSKDKIDYILLETTGVADPAPIAKMFWLDEGLASNIYIDGVVTVVDAEHITKCLDDVGGHWHKESLGEDVEFEDGITTAHLQLALADVILLNKIDKVSDTQPMTQRIRQINQTSPIHTTSFGDIEISKILDLHAFDVDAKLTTSETSFHDDRISTVTITFPFLENEEGFSKVENFLQHVLWDNLVNGKNVEVHRMKGLLVHGNDVRVVQGVRDTYEIIENGKLLEEVKENKLVFIGKNLHRPDLQEELSKFL

SEQ ID NO: 8001 - DNA, 1188 bp, Bacillus anthracis str. 'Ames Ancestor'
  CDS (1)..(1188): transl_table=11
atgaaaaaaatacctatcactgtattaagtgggtttttaggatccggaaaaactacattactacatcatattttaactaataagaacaacttaaaagtagctgttatcgttaatgatatgagcgaagtaaactttgatgcctcccttataaaaaaaggtggtttttcacgtacggaggaaaaactagtagaaattcaaaatggctgtatttgttgtacactacgagaagatttaataatagaagtgaatcgccttgttgaaaacggtgatattgactatatagtgattgaatcttccggtataagtgagccgattccagttgcccaaacatttacttatactgacgacgttcttaacattgatttaacgaaaaattgtcgcctcgatacgatggttacagttgtagatgcaaatagattttgggatgattttgcagatggagaaagtttattagatcgcaaacaagcaatcaatgaaaatgatactcgggaagttattgatttattaatagatcaaattgagtttgcaaatgtaattattcttaataagatagatttactagaaaaagaagatgtgatagaacttcatcaactgctacagaaattaaatcctaatgcaaaaattattgaatcttcctttagcaacgtaccactgcaagaaattttaaatacaaatgtattcaattatgaggaagccagtcaatcggcgggttggatacaagaattaaatagtgaacatcatacacccgaaacggaagaatacggtatcaattcctttgtataccgtcgtaaataccctttccatcctgaacgccttatgaattggctagaaaaatggcctgtagatgtcgtaagagcaaaaggctttttctggctcgcatctcgtaataatatgataggtcttctatctcaagcaggttcctctattacaattcaaggagccggtgaatggatagcagcattacctgaaactgaaagaaatcaaatgatcatagaagagccagaagtattgaaaaactgggataaacaatatggagatcgaataactgaactcgtatttattggaattgatatgaaccgttctttaattgaacaatcattagatgattgtctattaacagaaaaagaaatgacacaaaactggaatacattcattgatcctattccagcttttacttacacttcataa

SEQ ID NO: 8002 - protein, 395 aa, Bacillus anthracis str. 'Ames Ancestor'
MKKIPITVLSGFLGSGKTTLLHHILTNKNNLKVAVIVNDMSEVNFDASLIKKGGFSRTEEKLVEIQNGCICCTLREDLIIEVNRLVENGDIDYIVIESSGISEPIPVAQTFTYTDDVLNIDLTKNCRLDTMVTVVDANRFWDDFADGESLLDRKQAINENDTREVIDLLIDQIEFANVIILNKIDLLEKEDVIELHQLLQKLNPNAKIIESSFSNVPLQEILNTNVFNYEEASQSAGWIQELNSEHHTPETEEYGINSFVYRRKYPFHPERLMNWLEKWPVDVVRAKGFFWLASRNNMIGLLSQAGSSITIQGAGEWIAALPETERNQMIIEEPEVLKNWDKQYGDRITELVFIGIDMNRSLIEQSLDDCLLTEKEMTQNWNTFIDPIPAFTYTS

SEQ ID NO: 8003 - DNA, 924 bp, Bacillus anthracis str. 'Ames Ancestor'
  CDS (1)..(924): transl_table=11
atgaataaagtagaaattcatatattaggtggctttttaggtagcggaaaatcaacattattacaaaatttattgttagcggagaaaaagaagaatagaaaagttgcagtattaatgaatgaaattggtgagtactcggtagatacagatattattggaaaagagaatgttttaagggaacttctgaaaggatgtatttgctgtacgttaaaagaagagcttgaaatacagctgcattcgttatatcagcaagaaagaccagatgtcatttatatagaaacgacaggtgttgcgcatccaattgaagtgttagatgcatgtgtatcaccaattttagcacctttcttagaagtgaaatcaatagtagtcgttttagatgcagtaaggtggttaaatcgaagtgtattaagtgcaaatgttcagcaattattacatgagcaattgaagtttggtagccacattttaattaataaatcagatttactaatagaggcggataagaacaaagtaattgaagaagtgaaagcgataaataatcatgcgaaattgtttgaaacaaaatattgtaatatttctttagaagacatagaagaagctgaatttacgaatgacacggaacatgagacactacatgtaaaacagcatttacatatacaaacgatgacgtatcaatttacgaaatcaattgatcaagataaattatacgaatggctttcgaatttaccagatagtatttatcgtgtgaaaggttttgtgaaatttcatggggacaaatatcctcacttattccaatactcgttcggggtaccaactttactggaacaagacttcggtttcccaacgaacctggtagtaataggggaagggctagataagaaacaattggctgaagggttagagaaagtggaacttaattctaattaa

SEQ ID NO: 8004 - protein, 307 aa, Bacillus anthracis str. 'Ames Ancestor'
MNKVEIHILGGFLGSGKSTLLQNLLLAEKKKNRKVAVLMNEIGEYSVDTDIIGKENVLRELLKGCICCTLKEELEIQLHSLYQQERPDVIYIETTGVAHPIEVLDACVSPILAPFLEVKSIVVVLDAVRWLNRSVLSANVQQLLHEQLKFGSHILINKSDLLIEADKNKVIEEVKAINNHAKLFETKYCNISLEDIEEAEFTNDTEHETLHVKQHLHIQTMTYQFTKSIDQDKLYEWLSNLPDSIYRVKGFVKFHGDKYPHLFQYSFGVPTLLEQDFGFPTNLVVIGEGLDKKQLAEGLEKVELNSN

SEQ ID NO: 8005 - DNA, 951 bp, Bacillus anthracis str. 'Ames Ancestor'
  CDS (1)..(951): transl_table=11
atgattccagtaacaatattaactggttttcttggatctgggaaaacaacattattaaatcgtattttaacagagaatcacggtcagaaattagcggtgatcgtaaatgaaatagggaaaattggtatcgataatcagttgattatgaatgttgaagaagaaattatggaaatgacaaacggttgtttatgctgtactgtgcgggaagatttactcgttgcgttaaaacaattactggatgtaaaagcagaaggtaaaatggactttgatggattagtaattgaaacaactggtcttgcaaatccaggtcctattattcaaacattctttttagatcctgttattcaatctgcataccaaattaatggtgttgtaacagtagtagatagttatcatatacataaacattttgaaaaaggactagaagcaaaagaacaaattgcatttgccgatgttatattagtgaataagttagatttaattgaagagagcgaaaaagaaaacctcttacatgaactgcaaggaataaacccgactgcaaagttaattcagtcgactaactgtgatgtggatattccatcgttactaaaaattcaaacgtttaaaacgaaagatacgttacaaatttatcctcataaagagcataatcatctagaaggtgtaaaatcgtttgtactacgcgaagagcgtccgctagatttacaaaaactgaatgaatggatgtcagctgtcgttcaagaactaggtgaatatttatatcgctacaaaggaattttatcaattgatggagtagataaacgcatcgttttccaaggtgtgcatacactgtttgctgcatcatatgatagagagtggcaagagggcgaagaacgagtaagtgaagttgttttcatcggaaaagatattaataaagaatggttccaagaacattttgaggagtgtgtgaaataa

SEQ ID NO: 8006 - protein, 316 aa, Bacillus anthracis str. 'Ames Ancestor'
MIPVTILTGFLGSGKTTLLNRILTENHGQKLAVIVNEIGKIGIDNQLIMNVEEEIMEMTNGCLCCTVREDLLVALKQLLDVKAEGKMDFDGLVIETTGLANPGPIIQTFFLDPVIQSAYQINGVVTVVDSYHIHKHFEKGLEAKEQIAFADVILVNKLDLIEESEKENLLHELQGINPTAKLIQSTNCDVDIPSLLKIQTFKTKDTLQIYPHKEHNHLEGVKSFVLREERPLDLQKLNEWMSAVVQELGEYLYRYKGILSIDGVDKRIVFQGVHTLFAASYDREWQEGEERVSEVVFIGKDINKEWFQEHFEECVK

SEQ ID NO: 8007 - DNA, 1584 bp, Bacillus anthracis str. Sterne
  CDS (1)..(1584): transl_table=11
atgagtgaagaaacgattatccctagtaaaataaaaggtattgcttcaaaaataatacttaaaaagagtgtgttcacattcaaccatacttgcggcatacttttgtgcaaatttgctaggcttgtaaaatctaccaaaaataataaaaagagaaaaataacaataagcactatgcctgctaattcttttgaaactctattaaaaaccaaccttctcgcctccattttatttatatgtaaacatgtgcttgtccaaatgcatctactactacaacacaaatgttatagtctattcctattcttaaatcgtaatcattatgatttattattgatttttccctttcaatcatttaacataaaacgtaatcattacgatttaaaggagagaaataatttcatgaaaaaaatacctatcactgtattaagtgggtttttaggatccggaaaaactacattactacatcatattttaactaataagaacaacttaaaagtagctgttatcgttaatgatatgagcgaagtaaactttgatgcctcccttataaaaaaaggtggtttttcacgtacggaggaaaaactagtagaaattcaaaatggctgtatttgttgtacactacgagaagatttaataatagaagtgaatcgccttgttgaaaacggtgatattgactatatagtgattgaatcttccggtataagtgagccgattccagttgcccaaacatttacttatactgacgacgttcttaacattgatttaacgaaaaattgtcgcctcgatacgatggttacagttgtagatgcaaatagattttgggatgattttgcagatggagaaagtttattagatcgcaaacaagcaatcaatgaaaatgatactcgggaagttattgatttattaatagatcaaattgagtttgcaaatgtaattattcttaataagatagatttactagaaaaagaagatgtgatagaacttcatcaactgctacagaaattaaatcctaatgcaaaaattattgaatcttcctttagcaacgtaccactgcaagaaattttaaatacaaatgtattcaattatgaggaagccagtcaatcggcgggttggatacaagaattaaatagtgaacatcatacacccgaaacggaagaatacggtatcaattcctttgtataccgtcgtaaataccctttccatcctgaacgccttatgaattggctagaaaaatggcctgtagatgtcgtaagagcaaaaggctttttctggctcgcatctcgtaataatatgataggtcttctatctcaagcaggttcctctattacaattcaaggagccggtgaatggatagcagcattacctgaaactgaaagaaatcaaatgatcatagaagagccagaagtattgaaaaactgggataaacaatatggagatcgaataactgaactcgtatttattggaattgatatgaaccgttctttaattgaacaatcattagatgattgtctattaacagaaaaagaaatgacacaaaactggaatacattcattgatcctattccagcttttacttacacttcataa

SEQ ID NO: 8008 - protein, 527 aa, Bacillus anthracis str. Sterne
MSEETIIPSKIKGIASKIILKKSVFTFNHTCGILLCKFARLVKSTKNNKKRKITISTMPANSFETLLKTNLLASILFICKHVLVQMHLLLQHKCYSLFLFLNRNHYDLLLIFPFQSFNIKRNHYDLKERNNFMKKIPITVLSGFLGSGKTTLLHHILTNKNNLKVAVIVNDMSEVNFDASLIKKGGFSRTEEKLVEIQNGCICCTLREDLIIEVNRLVENGDIDYIVIESSGISEPIPVAQTFTYTDDVLNIDLTKNCRLDTMVTVVDANRFWDDFADGESLLDRKQAINENDTREVIDLLIDQIEFANVIILNKIDLLEKEDVIELHQLLQKLNPNAKIIESSFSNVPLQEILNTNVFNYEEASQSAGWIQELNSEHHTPETEEYGINSFVYRRKYPFHPERLMNWLEKWPVDVVRAKGFFWLASRNNMIGLLSQAGSSITIQGAGEWIAALPETERNQMIIEEPEVLKNWDKQYGDRITELVFIGIDMNRSLIEQSLDDCLLTEKEMTQNWNTFIDPIPAFTYTS

SEQ ID NO: 8009 - DNA, 963 bp, Bacillus anthracis str. Sterne
  CDS (1)..(963): transl_table=11
ttgaatacgtttgaaataaagaaatggatggtcgatcaaatgaataaagtagaaattcatatattaggtggctttttaggtagcggaaaatcaacattattacaaaatttattgttagcggagaaaaagaagaatagaaaagttgcagtattaatgaatgaaattggtgagtactcggtagatacagatattattggaaaagagaatgttttaagggaacttctgaaaggatgtatttgctgtacgttaaaagaagagcttgaaatacagctgcattcgttatatcagcaagaaagaccagatgtcatttatatagaaacgacaggtgttgcgcatccaattgaagtgttagatgcatgtgtatcaccaattttagcacctttcttagaagtgaaatcaatagtagtcgttttagatgcagtaaggtggttaaatcgaagtgtattaagtgcaaatgttcagcaattattacatgagcaattgaagtttggtagccacattttaattaataaatcagatttactaatagaggcggataagaacaaagtaattgaagaagtgaaagcgataaataatcatgcgaaattgtttgaaacaaaatattgtaatatttctttagaagacatagaagaagctgaatttacgaatgacacggaacatgagacactacatgtaaaacagcatttacatatacaaacgatgacgtatcaatttacgaaatcaattgatcaagataaattatacgaatggctttcgaatttaccagatagtatttatcgtgtgaaaggttttgtgaaatttcatggggacaaatatcctcacttattccaatactcgttcggggtaccaactttactggaacaagacttcggtttcccaacgaacctggtagtaataggggaagggctagataagaaacaattggctgaagggttagagaaagtggaacttaattctaattaa

SEQ ID NO: 8010 - protein, 320 aa, Bacillus anthracis str. Sterne
MNTFEIKKWMVDQMNKVEIHILGGFLGSGKSTLLQNLLLAEKKKNRKVAVLMNEIGEYSVDTDIIGKENVLRELLKGCICCTLKEELEIQLHSLYQQERPDVIYIETTGVAHPIEVLDACVSPILAPFLEVKSIVVVLDAVRWLNRSVLSANVQQLLHEQLKFGSHILINKSDLLIEADKNKVIEEVKAINNHAKLFETKYCNISLEDIEEAEFTNDTEHETLHVKQHLHIQTMTYQFTKSIDQDKLYEWLSNLPDSIYRVKGFVKFHGDKYPHLFQYSFGVPTLLEQDFGFPTNLVVIGEGLDKKQLAEGLEKVELNSN

SEQ ID NO: 8011 - DNA, 960 bp, Bacillus anthracis str. Sterne
  CDS (1)..(960): transl_table=11
atgtacgaaatgattccagtaacaatattaactggttttcttggatctgggaaaacaacattattaaatcgtattttaacagagaatcacggtcagaaattagcggtgatcgtaaatgaaatagggaaaattggtatcgataatcagttgattatgaatgttgaagaagaaattatggaaatgacaaacggttgtttatgctgtactgtgcgggaagatttactcgttgcgttaaaacaattactggatgtaaaagcagaaggtaaaatggactttgatggattagtaattgaaacaactggtcttgcaaatccaggtcctattattcaaacattctttttagatcctgttattcaatctgcataccaaattaatggtgttgtaacagtagtagatagttatcatatacataaacattttgaaaaaggactagaagcaaaagaacaaattgcatttgccgatgttatattagtgaataagttagatttaattgaagagagcgaaaaagaaaacctcttacatgaactgcaaggaataaacccgactgcaaagttaattcagtcgactaactgtgatgtggatattccatcgttactaaaaattcaaacgtttaaaacgaaagatacgttacaaatttatcctcataaagagcataatcatctagaaggtgtaaaatcgtttgtactacgcgaagagcgtccgctagatttacaaaaactgaatgaatggatgtcagctgtcgttcaagaactaggtgaatatttatatcgctacaaaggaattttatcaattgatggagtagataaacgcatcgttttccaaggtgtgcatacactgtttgctgcatcatatgatagagagtggcaagagggcgaagaacgagtaagtgaagttgttttcatcggaaaagatattaataaagaatggttccaagaacattttgaggagtgtgtgaaataa

SEQ ID NO: 8012 - protein, 319 aa, Bacillus anthracis str. Sterne
MYEMIPVTILTGFLGSGKTTLLNRILTENHGQKLAVIVNEIGKIGIDNQLIMNVEEEIMEMTNGCLCCTVREDLLVALKQLLDVKAEGKMDFDGLVIETTGLANPGPIIQTFFLDPVIQSAYQINGVVTVVDSYHIHKHFEKGLEAKEQIAFADVILVNKLDLIEESEKENLLHELQGINPTAKLIQSTNCDVDIPSLLKIQTFKTKDTLQIYPHKEHNHLEGVKSFVLREERPLDLQKLNEWMSAVVQELGEYLYRYKGILSIDGVDKRIVFQGVHTLFAASYDREWQEGEERVSEVVFIGKDINKEWFQEHFEECVK

SEQ ID NO: 8013 - DNA, 1029 bp, Bartonella henselae str. Houston-1
  CDS (1)..(1029): transl_table=11
atggaaaagacgcaaaatacgcccaataaacttcctgttacagttcttacaggatatcttggctcaggaaaaaccactcttctcaatcgcattctcagtgaaaaccacggcaaacgttatgcagtcattgtcaatgaatttggtgaaattggcattgataatgaccttatcgttgaatcagatgaagaaatttatgaaatgaataatggctgtgtttgctgtaccgtacgcggcgatcttattcgcattctagaaagtctgatgcgacgctctcaccgatttgatgctatcattatagaaacaacagggcttgctgatccggttcctgttgcacaaactttttttatggatgatacggtgaatacaaaaacagctctcgacagtgtcatagcagtcgttgatgcaaagcatctttcactccaacttaaaaaaagccgagaagctgaagagcaaattgccttcgctgatatcattcttttaaataagattgatcttgtaagtgtaaaagaacgtgcacaggctgaatcactcattctggcaattaatccacgagctgtgatttatgcaacagagcgtacgaacatccctcttgataaactcctcgatcgtggttcatttgacctccaacgtgttttagagaatgatcaccattttcttgatcaccagcatttcgaccatgtatgtggtcccgattgcaatcatgatcatacacatcatcatacatctgtccttcatgatattacgataacttctgtaagtttaaaaacaggtgcccttcaaccagaaaagttttttccatggatccaacaaattactcagcaaaaaggtcctgatattttgcgtttaaaggggattatcgcctttcaaggagatgatgatcgttatgttattcaaggcatacacatgatcctggaaggacaacaccaacgtccatggcgtgaagatgaaaaacgtgaaagccgacttgtttttattggccgcactcttgatgctaaacagcttaagactggttttgaaaattgtgcataa

SEQ ID NO: 8014 - protein, 342 aa, Bartonella henselae str. Houston-1
MEKTQNTPNKLPVTVLTGYLGSGKTTLLNRILSENHGKRYAVIVNEFGEIGIDNDLIVESDEEIYEMNNGCVCCTVRGDLIRILESLMRRSHRFDAIIIETTGLADPVPVAQTFFMDDTVNTKTALDSVIAVVDAKHLSLQLKKSREAEEQIAFADIILLNKIDLVSVKERAQAESLILAINPRAVIYATERTNIPLDKLLDRGSFDLQRVLENDHHFLDHQHFDHVCGPDCNHDHTHHHTSVLHDITITSVSLKTGALQPEKFFPWIQQITQQKGPDILRLKGIIAFQGDDDRYVIQGIHMILEGQHQRPWREDEKRESRLVFIGRTLDAKQLKTGFENCA

SEQ ID NO: 8015 - DNA, 1062 bp, Bartonella henselae str. Houston-1
  CDS (1)..(1062): transl_table=11
atgaaaacaaagcgcattcctctcacgcttattaccggctttctaggctcgggcaaaacgactttgctcaaccggatgttgcgcgatcctcttttggctgacagcgctgttatcatcaatgaatttggtgacgtgagtattgatcaccttttggttaaaaaaacaacagaagggatcattgaactcgctaatggttgcttatgttgtaatttacgcagtgatctcattgatacattaatcgatttgattgatcgcgttcatacaggacatctcaaaaaactcaatcgcattatcattgaaacaacaggaatggctgatcccgcacctattttacaagctctgctaaatcatccacttttaatgcaaacattgtccatcgacgctgttcttgtaacattcgatacattaaacacgctttccatattcaaacgccaccctgaaatacacaaacaattatcacttgctgacaaaattatcctcacaaaaacagaccttactcatccaaaaacgctttcaaacacgcttcttaccacactcaaagcaattaatcctatagcgcaaatcatcgatgttcattctgaccatttctgttcaactgcattcataagtaaaatattatgggatgaaaaaacagaaaacacgcggcttaaacaatgctgctctattgctccacacgatcatacgcaccaatcgaccattcgtgctttttctctagactatgaagagaccattgattacgccacccttgatacttttttagatctcctaaaaaatttttatggcgcaaaactattacggatcaaagcaattattgcattgcatgatgatcccctacgtccacttgtgctacacagcgtacaaacattttttcatccaccaataagacttccagcatggccaaaaggaattacacaaacccgttttgtcatcattgccgatggtattgaaaaagaagcaatacaaaaactcttcaatgctcttttaaacaaaccagcaatagatactgcagacaaaaccgccatattggagaacccactgcttattccaggaataaaattttag

SEQ ID NO: 8016 - protein, 353 aa, Bartonella henselae str. Houston-1
MKTKRIPLTLITGFLGSGKTTLLNRMLRDPLLADSAVIINEFGDVSIDHLLVKKTTEGIIELANGCLCCNLRSDLIDTLIDLIDRVHTGHLKKLNRIIIETTGMADPAPILQALLNHPLLMQTLSIDAVLVTFDTLNTLSIFKRHPEIHKQLSLADKIILTKTDLTHPKTLSNTLLTTLKAINPIAQIIDVHSDHFCSTAFISKILWDEKTENTRLKQCCSIAPHDHTHQSTIRAFSLDYEETIDYATLDTFLDLLKNFYGAKLLRIKAIIALHDDPLRPLVLHSVQTFFHPPIRLPAWPKGITQTRFVIIADGIEKEAIQKLFNALLNKPAIDTADKTAILENPLLIPGIKF

SEQ ID NO: 8017 - DNA, 1188 bp, Bacillus thuringiensis serovar konkukian str. 97-27
  CDS (1)..(1188): transl_table=11
atgaaaaaaatacctatcactgtattaagtgggtttttaggatccggaaaaactacattactacatcatattttaactaataagaacaacttaaaagtagctgttatcgttaatgatatgagcgaagtaaacattgatgcctcccttataaaaaaaggtggtttttcacgtacggaggaaaaactagtagaaattcaaaatggctgtatttgttgtacactacgagaagatttaataatagaagtgaatcgccttgttgaaaacggtgatattgactatatagtgattgaatcttccggtataagtgagccgattccagttgcccaaacatttacttatactgacgacgttcttaacattaatttaacgaaaaattgtcgcctcgatacgatggttacagttgtagatgcaaatagattttgggatgattttgcagatggagaaagtttattagatcgcaaacaagcaatcaatgaaaatgatactcgggaagttattgatttattaatagatcaaattgagtttgcaaatgtaattattcttaataagatagatttactagaaaaagaagatgtgatagaacttcatcaactgctacagaaattaaatcctaatgcaaaaattattgaatcttcctttagcaacgtaccactgcaagaaattttaaatacaaatgtattcaattatgaggaagccagtcaatcggcgggttggatacaagaattaaatagtgaacatcatacacccgaaacggaagaatacggtatcaattcctttgtataccgtcgtaaataccctttccatcctgaacgccttatgaattggctagaaaaatggcctgtagatgtcgtaagagcaaaaggctttttctggctcgcatctcgtaataatatgataggtcttctgtctcaagcaggttcctctattacaattcaaggagccggtgaatggatagcagcattacctgaaactgaaagaaatcaaatgatcatagaagagccagaagtattgaaaaactgggataaacaatatggagatcgaataactgaactcgtatttattggaattgatatgaaccgttctttaattgaacaatcattagatgattgtctattaacagaaaaagaaatgacacaaaactggaatacattcattgatcctattccagcttttacttacacttcataa

SEQ ID NO: 8018 - protein, 395 aa, Bacillus thuringiensis serovar konkukian str. 97-27
MKKIPITVLSGFLGSGKTTLLHHILTNKNNLKVAVIVNDMSEVNIDASLIKKGGFSRTEEKLVEIQNGCICCTLREDLIIEVNRLVENGDIDYIVIESSGISEPIPVAQTFTYTDDVLNINLTKNCRLDTMVTVVDANRFWDDFADGESLLDRKQAINENDTREVIDLLIDQIEFANVIILNKIDLLEKEDVIELHQLLQKLNPNAKIIESSFSNVPLQEILNTNVFNYEEASQSAGWIQELNSEHHTPETEEYGINSFVYRRKYPFHPERLMNWLEKWPVDVVRAKGFFWLASRNNMIGLLSQAGSSITIQGAGEWIAALPETERNQMIIEEPEVLKNWDKQYGDRITELVFIGIDMNRSLIEQSLDDCLLTEKEMTQNWNTFIDPIPAFTYTS

SEQ ID NO: 8019 - DNA, 924 bp, Bacillus thuringiensis serovar konkukian str. 97-27
  CDS (1)..(924): transl_table=11
atgaataaagtagaaattcatatattaggtggctttttaggtagcggaaaatcaacattattacaaaatttattgttagcggagaaaaagaagaatagaaaagttgcagtgttaatgaatgaaattggtgaatactcagtagatacagatattattggaaaagagaatgttttaagggaacttcttaaagggtgtatttgttgtacgttaaaagaagagcttgaaatacaattacattcgttatatcagcaagaaagaccagatgtcatttatatagaaacgacaggtgttgcgcatccaattgaagtgttagatgcatgtgtatcaccaattttagcacctttcttagaagtgaaatcaatagtagtcgttttagatgcagtaaggtggttaaatcgaagtatattaagtgcaaatgttcagcaattattgcatgagcaattgaagtttggtagccatattttaattaataaatcagatttactaacagatgcggataagaacaaagtaattgaagaagtgaaagcaataaataatcatgcaaaattgtttgaaacaaaatattgtaatatatctttagaagacatagaggaagctgaatttacgaatgatggggaacatgagacactacatgtaaaacagcatttacatatacaaacgatgacataccaatttacgaaatcgattaatcaagataaattatacgaatggctttcgaatttaccagatagtatttatcgtgtgaaaggctttgtgaaattccatggagataaatacccgcacttattccaatattcgttcggggtaccgactttactggaacaagacttcggtttcccgacgaacttggtagtaataggggaagggttagataagaaacaattggctgaagggttagagaaagtagaacttaactctaattaa

SEQ ID NO: 8020 - protein, 307 aa, Bacillus thuringiensis serovar konkukian str. 97-27
MNKVEIHILGGFLGSGKSTLLQNLLLAEKKKNRKVAVLMNEIGEYSVDTDIIGKENVLRELLKGCICCTLKEELEIQLHSLYQQERPDVIYIETTGVAHPIEVLDACVSPILAPFLEVKSIVVVLDAVRWLNRSILSANVQQLLHEQLKFGSHILINKSDLLTDADKNKVIEEVKAINNHAKLFETKYCNISLEDIEEAEFTNDGEHETLHVKQHLHIQTMTYQFTKSINQDKLYEWLSNLPDSIYRVKGFVKFHGDKYPHLFQYSFGVPTLLEQDFGFPTNLVVIGEGLDKKQLAEGLEKVELNSN

SEQ ID NO: 8021 - DNA, 951 bp, Bacillus thuringiensis serovar konkukian str. 97-27
  CDS (1)..(951): transl_table=11
atgattccagtaacaatattaactggttttcttggttcagggaaaacgacattattaaatcgtattttatcagagaatcacggtcagaaattggcggtgatcgtaaatgaaatcgggcaaattggtattgataatcagttgattatgaatgttgaagaagaaattatggaaatgacaaacggctgtttatgctgtactgtacgtgaggatttactcgttgcgttaaaacaattactggacgtaaaagcagaagggaaaatggactttgatggattagtaattgaaacgacgggtcttgcaaatccaggtcctattattcaaacattctttttagatcctgttattcaatctgcataccaaattaatggtgttgtaacagtagtagatagttatcatatacataaacattttgaaaaaggactagaagcaaaggaacaaattgcatttgccgatgttgtattagtgaataagttagatttaattgaagagagcgaaaaagaaaatctcttacatgaactgcaaggaataaatccgactgcaaagttaattcagtcgactcactgtgatgtagatattccatcgttactaaaaattcaaacgtttaaaacgaaagatacgttacaaatttatcctcataaagagcataatcatctagaaggtgtaaaatcgtttgtactacgtgaagagcgtccgttagatttacaaaaactaaatgagtggatgtcagctgtcgttcaagaactgggagaatacttatatcgctacaaaggaattttatcgattgatgaagtggataaacgtatcgtttttcaaggtgtacatacgttatttgctgcttcgtatgatagagagtggcaagagggcgaagatcgagtaagtgaagttgttttcatcggaaaagatattaataaagaatggttccaagaacattttgaggagtgtgtgaaataa

SEQ ID NO: 8022 - protein, 316 aa, Bacillus thuringiensis serovar konkukian str. 97-27
MIPVTILTGFLGSGKTTLLNRILSENHGQKLAVIVNEIGQIGIDNQLIMNVEEEIMEMTNGCLCCTVREDLLVALKQLLDVKAEGKMDFDGLVIETTGLANPGPIIQTFFLDPVIQSAYQINGVVTVVDSYHIHKHFEKGLEAKEQIAFADVVLVNKLDLIEESEKENLLHELQGINPTAKLIQSTHCDVDIPSLLKIQTFKTKDTLQIYPHKEHNHLEGVKSFVLREERPLDLQKLNEWMSAVVQELGEYLYRYKGILSIDEVDKRIVFQGVHTLFAASYDREWQEGEDRVSEVVFIGKDINKEWFQEHFEECVK

SEQ ID NO: 8023 - DNA, 1203 bp, Staphylococcus aureus subsp. aureus MRSA252
  CDS (1)..(1203): transl_table=11
atggctaaaattccagttacggtattaagtggttatttaggctcggggaaaacaacgttgttaaatcatattttacaaaatcgtgaaggtcgacgtatcgcagtaattgtaaatgatatgagtgaagttaatatcgataaagatcttgtcgcagatggtgggggactatcgcgcacagacgaaaaattagtcgaactttctaacggttgtatctgttgtacacttagagacgatttattaaaagaagttgagcgtttagtgaaaaaaggtggcatcgatcaaattgttattgagtcaacagggatttcagagccagtacctgttgcacaaactttctcatatattgatgatgaacttggcattgatcttacagcgatttgccgtttagatacaatggttacagttgtggatgctaaccgcttcgtccatgacatcaactcagaagatttattgatggatcgtgatcaaagcgttgatgaaacagatgagcgttcgattgctgatttattaattgaccaagttgaattttgtgatgtattgattattaataaaattgacttaataagtgaagaagaactagcgaagttagaaaaagtgttaagtgcattgcaaccgactgctaaaattattaagacaacaaattctgaagtagatttaaaagaagtcttgaatacgcagcgttttgattttgaaaaagcgagcgagtcagcaggatggatcaaagaacttgagtctggtgggcatgcatcgcatacacctgaaacagaagaatatggtatatcatcgtttgtatataaacgtcgtctacctttccatgctaaaaggttcaatgattggttagaaagcatgccaaataatgtcgttcgatcaaaaggtatcgtatggttagcacaatacaatcatgtagcatgtttattatctcaagcagggtcatcttgcaatattcatccagttacatattgggtggctagtatgtctgaagcgcaacaaacgcaaatattagcagaacgccaagacgtcgcagctgaatgggatccagaatatggcgatcgtcatacacaatttgtcattattggtacagacttagatgaaggtgcaattacaaaagaactcgatgcatgcttagtcaatgcgcaagaaattgatgcagattggcaacaatttgaagatccatatcaatggcaaattagaccggcacgataa

SEQ ID NO: 8024 - protein, 400 aa, Staphylococcus aureus subsp. aureus MRSA252
MAKIPVTVLSGYLGSGKTTLLNHILQNREGRRIAVIVNDMSEVNIDKDLVADGGGLSRTDEKLVELSNGCICCTLRDDLLKEVERLVKKGGIDQIVIESTGISEPVPVAQTFSYIDDELGIDLTAICRLDTMVTVVDANRFVHDINSEDLLMDRDQSVDETDERSIADLLIDQVEFCDVLIINKIDLISEEELAKLEKVLSALQPTAKIIKTTNSEVDLKEVLNTQRFDFEKASESAGWIKELESGGHASHTPETEEYGISSFVYKRRLPFHAKRFNDWLESMPNNVVRSKGIVWLAQYNHVACLLSQAGSSCNIHPVTYWVASMSEAQQTQILAERQDVAAEWDPEYGDRHTQFVIIGTDLDEGAITKELDACLVNAQEIDADWQQFEDPYQWQIRPAR

SEQ ID NO: 8025 - DNA, 927 bp, Staphylococcus aureus subsp. aureus MRSA252
  CDS (1)..(927): transl_table=11
atgaaaaataataaagatgaaaaaataagaatatccataattaacggatttttgggtagtggtaaaaccacgttactgacacattatattagtgaattattaaaaaatgatgagaaaattaaaatcatcatgaatgaattcggtactgttgatatcgatagcaatagtatttcaaatgaaattgaagtccattcattgattaatggttgtgtttgttgcgatcttaaacaagaacttgtctatgaactaaaagccattgctttaaaaggggacgttaatcatgtcatcatagaagcgacaggcattgcgcatcctttagaattactagttgcatgtcaagatccgcaaatcgttaatttctttgaaaagccaattatttatggtgtattagatgcgactcgatttttggaacgtcatcaatataccgaaaatacagtttcgctgatggaagatcagttgaaactaagtgacatgattattattaataaaattgatcttgtaactgatgacagtattgagaaaattgataagcaattaagtttgatttgtgcaagtattccaacttataaaacaacctatggacaagtttcgttggaagaattggacttacctggtaaagacagagagatatcgtcgcatcatcaccatcatcatgggattaaaagtatgacttacacatttacaggtccgattgatcgtcaattgttttatcaatttataatgaaattatcggaatctgttctacgtttgaaaggttatgtatcatttagagatcaaccaaatgcaatttatgaatttcaatatgcttatggtttaccagattatggaataattggcatgcaattaccattaacgattgttattattggtgaaactttagatacaaatcacatacgtaatcaattggatatgctacaatttacgtaa

SEQ ID NO: 8026 - protein, 308 aa, Staphylococcus aureus subsp. aureus MRSA252
MKNNKDEKIRISIINGFLGSGKTTLLTHYISELLKNDEKIKIIMNEFGTVDIDSNSISNEIEVHSLINGCVCCDLKQELVYELKAIALKGDVNHVIIEATGIAHPLELLVACQDPQIVNFFEKPIIYGVLDATRFLERHQYTENTVSLMEDQLKLSDMIIINKIDLVTDDSIEKIDKQLSLICASIPTYKTTYGQVSLEELDLPGKDREISSHHHHHHGIKSMTYTFTGPIDRQLFYQFIMKLSESVLRLKGYVSFRDQPNAIYEFQYAYGLPDYGIIGMQLPLTIVIIGETLDTNHIRNQLDMLQFT

SEQ ID NO: 8027 - DNA, 1203 bp, Staphylococcus aureus subsp. aureus MSSA476
  CDS (1)..(1203): transl_table=11
atggctaaaattccagttacggtattaagtggttatttaggctcggggaaaacaacgttgttaaatcatattttacaaaatcgagaaggtcgacgtattgcggtaattgtaaatgatatgagtgaagtcaatatcgataaagatcttgtcgcagatggtgggggactatcgcgcacagacgaaaaattagtcgaactttctaatggttgtatctgttgtacacttagagacgatttattaaaagaagttgagcgtttagtgaaaaaaggtggcatcgatcaaattgttattgagtcaacagggatttcagagccagtacctgttgcacaaactttctcatatattgatgatgaacttggcattgatcttacagcgatttgccgtttagatacaatggttacagttgtggatgctaaccgcttcgtacatgacatcaactcagaagatttattgatggatcgtgatcaaagcgttgatgaaacagatgagcgttcgattgctgatttattaattgaccaagttgaattttgtgatgtattgattattaataaaattgatttaattagtgaagaagaacttgcgaagttagaaaaagtgttaagtgcattgcaacctactgctaaaattattaagacaataaattctgaagtggatttaaaagaagtcttaaatacgcagcgttttgattttgaaaaagcgagcgagtcagcaggatggatcaaagaacttgagtctggtgggcatgcatcgcatacacctgaaacagaagaatatggtatatcatcgtttgtatataaacgtcgacttcctttccatgctaaaaggttcaatgattggttagaaaccatgccaaataatgtcgttcgatcaaaaggtatcgtatggctagcacaatacaatcacgtagcatgtttattatctcaagcagggtcatcttgcaatattcatccagttacatattgggtggctagtatgtctgaagcacaacaaacgcaaatattagcagaacgccaagacgtcgcagctgaatgggatccagaatatggcgatcgtcatacacaatttgtcattattggtaccgacttagatgaagaaaaattaacaaaagaactcgatgcatgcttagtcaatgcgcaagaaattgatgcagattggcaacaatttgaagatccatatcaatggcaaattagaccagcacgataa

SEQ ID NO: 8028 - protein, 400 aa, Staphylococcus aureus subsp. aureus MSSA476
MAKIPVTVLSGYLGSGKTTLLNHILQNREGRRIAVIVNDMSEVNIDKDLVADGGGLSRTDEKLVELSNGCICCTLRDDLLKEVERLVKKGGIDQIVIESTGISEPVPVAQTFSYIDDELGIDLTAICRLDTMVTVVDANRFVHDINSEDLLMDRDQSVDETDERSIADLLIDQVEFCDVLIINKIDLISEEELAKLEKVLSALQPTAKIIKTINSEVDLKEVLNTQRFDFEKASESAGWIKELESGGHASHTPETEEYGISSFVYKRRLPFHAKRFNDWLETMPNNVVRSKGIVWLAQYNHVACLLSQAGSSCNIHPVTYWVASMSEAQQTQILAERQDVAAEWDPEYGDRHTQFVIIGTDLDEEKLTKELDACLVNAQEIDADWQQFEDPYQWQIRPAR

SEQ ID NO: 8029 - DNA, 927 bp, Staphylococcus aureus subsp. aureus MSSA476
  CDS (1)..(927): transl_table=11
atgaaaaataataaagatgaaaaaataagaatatccataattaacggatttttgggtagtggtaaaaccacgttactgacacattatattagtgaattattaaaaaatgatgagaaaattaaaatcatcatgaatgaattcggtacttttgatattgatagcaatagtatttcaaatgaaattgaagtccattcattgattaatggttgtgtttgttgcgatcttaaacaagaacttgtctatgaactaaaagccattgctttaaaaggggacgttaatcatgtcatcatagaaacgacaggcattgcgcatcctttggaattactagttgcatgtcaagatccgcaaatcgttaatttctttgaaaagccgattatttatggtgtattagatgcgactcgatttttagaacgtcatcaatataccgaaaatacagtttcgctgatggaagatcagttgaaactaagtgacatgattattattaataaaattgatcttataactgatgaccgtcttgagagaattgataagcaattaggtatgatttgtgcaagtattccaacatataaaacaacctatggaaaagtttcgttggaagaattggacttaactgttaaagacagagagatatcgtctcatcatcaccatcatcatgggattaaaagtatgacttacacgtttacaggtccgattgatcgtcaattgttttatcaatttataatgaaattaccggaatctgttctacgtttgaaaggttatgtgtcatttagagatcaaccaaatgcaatttatgaatttcaatatgcatatggtttaccagactatggaataattggcatgcaattaccattaacgattgttattattggtgaaactttagatacaaatcacatacgtaatcaattggatatgctacaatttacgtaa

SEQ ID NO: 8030 - protein, 308 aa, Staphylococcus aureus subsp. aureus MSSA476
MKNNKDEKIRISIINGFLGSGKTTLLTHYISELLKNDEKIKIIMNEFGTFDIDSNSISNEIEVHSLINGCVCCDLKQELVYELKAIALKGDVNHVIIETTGIAHPLELLVACQDPQIVNFFEKPIIYGVLDATRFLERHQYTENTVSLMEDQLKLSDMIIINKIDLITDDRLERIDKQLGMICASIPTYKTTYGKVSLEELDLTVKDREISSHHHHHHGIKSMTYTFTGPIDRQLFYQFIMKLPESVLRLKGYVSFRDQPNAIYEFQYAYGLPDYGIIGMQLPLTIVIIGETLDTNHIRNQLDMLQFT

SEQ ID NO: 8031 - DNA, 1017 bp, Acinetobacter sp. ADP1
  CDS (1)..(1017): transl_table=11
ttgcatgtgaaactgctcattcctcagactgttcccacacatattatttctggatttctaggcgcaggtaaaacgacgctgctacagcacttactgagtcagaagccagaaaatgaagtctgggctgtactgatgaatgagtttggccagattggtatcgatcagcaacttttacctcagcaacaaggttatcaagtcaaggaattgttgggcggttgtttatgctgtagcagtcaactgcctttacatattgcattggcccgattacttaccgagactcaaccagatcgactttttattgaacctacaggtttagggcatcctgcccaattggtggagcaactgactgaacctcattggcaaagtagtttgaatatgcgtgcattgattactgtgctggatgggagccgtttgcatgaagaggcatgggttcagcaaaacttatatgaagatcagttaaaagcagcacagatagtggtggtgtcgcatggtgatcaaatgagtggtacagatgaaaaggcgttagaaaaattacaggaagaatatcaagcctattcacaatcttggtttaaaacggcaaatggtgaattagccttagacgctattgatcatcctcatcttgtcacctctagaatcttacagccgttacttatgcaacagaaaacattcgtttcagcacaagaaccaataccagagatcaaacagcttccatatcactatgttgaaagttcgcaaggttatcatgtagcaggctggaaaatgccacgtcgctggatttttgattttgactcgttatttgagttgttatgcaatcaatccaactggctcagaatcaaagcgatttttaataccagtcagggctggatgatatttaattttaatcccgaacagtttaattacaaaacaggacaggccaatacggatagtcgaattgaaattattacaagccagttaggcaactggcttgattttgagaaacagttaatggcatgtcggctagatgagcagaatacttaa

SEQ ID NO: 8032 - protein, 338 aa, Acinetobacter sp. ADP1
MHVKLLIPQTVPTHIISGFLGAGKTTLLQHLLSQKPENEVWAVLMNEFGQIGIDQQLLPQQQGYQVKELLGGCLCCSSQLPLHIALARLLTETQPDRLFIEPTGLGHPAQLVEQLTEPHWQSSLNMRALITVLDGSRLHEEAWVQQNLYEDQLKAAQIVVVSHGDQMSGTDEKALEKLQEEYQAYSQSWFKTANGELALDAIDHPHLVTSRILQPLLMQQKTFVSAQEPIPEIKQLPYHYVESSQGYHVAGWKMPRRWIFDFDSLFELLCNQSNWLRIKAIFNTSQGWMIFNFNPEQFNYKTGQANTDSRIEIITSQLGNWLDFEKQLMACRLDEQNT

SEQ ID NO: 8033 - DNA, 1209 bp, Acinetobacter sp. ADP1
  CDS (1)..(1209): transl_table=11
atgactgacgttatattgaatcccactaaatatgttaactccacacgcattccagtgactgttttatcaggttttttaggttctggtaaaacaactctactcaattatatcttgaaccatcaaaaagatatgcgaattgctgtgatcgtgaatgatatgagtgaaatcaatattgatgcagaagatgtacgtcgtcatgttaatttaaatagaggcagtgaccaacttattgaaatgagcaatggctgtatttgttgcacattaagagctgatttacttgaacaagtcagccttctcgctcgccaggccgaatttgattatatattaatcgaatctacaggtatttcagagcctatgcccgttgccgaaacctttgcatttttagaccaacatggatttagtttaagcgaattagcgcgcctggataccatggttactgtcgtcaatggtgaaaattttgagcaaatgattcaatctcgtgacaagatcgaaatggatcatcctgatgaggtttcagttcaacgacatttatcagatttgctgttggagcaggtcgaatatgcaaatgttattttagtcagtcgcatagatatcattggtgaagatcgattcaaacatttacgttctttacttgcagagcttaatccatccgccaagatttttccaatttctcatggtgccattgacctcaacaacattttaaatacgtatacatttgatttacccgatttggttaaatcaccaggatggatgaaacatctggatcaggaacaagcggttcattctgaatctgaaacttatgggatctcgtcatgggtatacagtgcgcgcttaccctttcatcctcaacggttccagcactttttagcacacccctggactaacggtacgctactccgttgtaaaggttatatatggaatgccaagtgttatcaggacattggcatgcttgttcaaacaggtggtcagtttgaatgggaaatcgttgggcgctggtggaactttattaatcaatcagactggcctcaagaccattatcgacgcgatagtatttttgaaaaatgggatgagcgtacaggggactgtcgtcaggaaattgtatttattggccaaaatattgactggaacacactcaaacatcaacttgatgattgtctgttaacacttcaggaaattgaagatggccccgaagcatggcttaattattaa

SEQ ID NO: 8034 - protein, 402 aa, Acinetobacter sp. ADP1
MTDVILNPTKYVNSTRIPVTVLSGFLGSGKTTLLNYILNHQKDMRIAVIVNDMSEINIDAEDVRRHVNLNRGSDQLIEMSNGCICCTLRADLLEQVSLLARQAEFDYILIESTGISEPMPVAETFAFLDQHGFSLSELARLDTMVTVVNGENFEQMIQSRDKIEMDHPDEVSVQRHLSDLLLEQVEYANVILVSRIDIIGEDRFKHLRSLLAELNPSAKIFPISHGAIDLNNILNTYTFDLPDLVKSPGWMKHLDQEQAVHSESETYGISSWVYSARLPFHPQRFQHFLAHPWTNGTLLRCKGYIWNAKCYQDIGMLVQTGGQFEWEIVGRWWNFINQSDWPQDHYRRDSIFEKWDERTGDCRQEIVFIGQNIDWNTLKHQLDDCLLTLQEIEDGPEAWLNY

SEQ ID NO: 8035 - DNA, 1209 bp, Acinetobacter sp. ADP1
  CDS (1)..(1209): transl_table=11
atggtcagttccgtagccaatccttcatacaaacttcctgttactgtcttatcaggatttttaggtgcaggaaaaacaaccttgcttaatcatattttaaacaatcgcgaaggtcgccgtgtagcagtgattgtaaatgatatgtcagaagtcaatattgatgctgctctggttcaaaatggtggcgcagaactctcacgtacagatgaaaaactcgtcgaaatgagcaatggttgtatatgttgtacgttacgtgaagatttattgattgaagttaaacgcttggcagaagaaaacaaatttgaccaactggtgattgaatcgactggaatatcggaacctcttcctgtcgcagaaacctttacttttgcagatgaagcaggtcaatctttaaatgaatttgctcaactcgatacaatggtgactgtggttgacgcatttaattttctacaagactatagctcttatgatcaattaaatgatcgtggtgagtctcttggcgagcacgatcaacgcagcgttgtagatttgcttatcgatcagattgagttttgcgatgtaatcatcctgaataaagtggacttgattgatgatattaaaaaagaacgtttaatggctattctgaataaacttaatccacgggcaagaattcaaatttcagaatttggaaaagtagatttagattcagtcttgaatacaggtttatttgatttcgatcaagctgcacaagccccaggctggctaaaagaacttcgtggtgaacatgtgccagaaacagaagaatacggcattacaagttttgtatatcgcgctcgtcgcccttttcatccacaacggttttttaattttattaattctgaatggccaggtgttattcgttcaaaaggttttttctggctagcctgcgaaccaacgctcgcatgctcttggtcacaagctggtggtatggcaagacacggtatggcaggcacatggtgggctgcaacagaaccagagaactggccaagagatgatcagtcacttgccgaaattgaaaaacattgggatgaaaaagttggtgatgctcgtcaagagattgtcatgattggaatggatatgaatcaagatacacttattcaaggtttcaatgaatgtctactcagcgatgatgaaatggcgcttggccctgacggctggactcaaatgtcaaatccgtttgattggtcttaa

SEQ ID NO: 8036 - protein, 402 aa, Acinetobacter sp. ADP1
MVSSVANPSYKLPVTVLSGFLGAGKTTLLNHILNNREGRRVAVIVNDMSEVNIDAALVQNGGAELSRTDEKLVEMSNGCICCTLREDLLIEVKRLAEENKFDQLVIESTGISEPLPVAETFTFADEAGQSLNEFAQLDTMVTVVDAFNFLQDYSSYDQLNDRGESLGEHDQRSVVDLLIDQIEFCDVIILNKVDLIDDIKKERLMAILNKLNPRARIQISEFGKVDLDSVLNTGLFDFDQAAQAPGWLKELRGEHVPETEEYGITSFVYRARRPFHPQRFFNFINSEWPGVIRSKGFFWLACEPTLACSWSQAGGMARHGMAGTWWAATEPENWPRDDQSLAEIEKHWDEKVGDARQEIVMIGMDMNQDTLIQGFNECLLSDDEMALGPDGWTQMSNPFDWS

SEQ ID NO: 8037 - DNA, 987 bp, Erwinia carotovora subsp. atroseptica SCRI1043
  CDS (1)..(987): transl_table=11
atgactcaacctttatcctctgatgtgactaaacctgtgtatgtcactattttgaccgggtttctcggtgccggaaaaaccaccttattacggcatatcctgaatgccgaacacggctacaagattgccgtgattgaaaatgagttcggcgaagttccgattgataatacgctaatcggtgaacgtgccagccagattacgacgctgagtaacggctgtatctgttgcacgaagtccaatgagctggctgatgcgctgctcgatctggttgatggcgtggataacggcacgctagattttgatcacgtcatcattgaatgcactggtatggccgatccggggccggtggcgcaaaccttcttctctcatgaagttatctgtgaacgctttgttctggacggaatcatcacgttggttgatgcggcacatgcgcaacaacagcttaatcagttcaccatcgcacagtcacagattggctatgctgatcgcatactgctaaccaaaaccgatgtggcaagcgaagacgagacgctgctaccgcgtttgcaacgcatcaacgcgcgcgcaccaatctatcctgtggtacacgggaatatcgatctgagcgtgctgtttaacatcgacggctttgtccttagtgacaagctggacgtgaaaacgccggtatttcgctttgtcgctcctacgcagaataacgtgcagtcgattgttgtgtatctcgatgatgccgttgagcttcaggcagtctccgatgtgatggaaaacctgctgctacaattctccgataatctactgcgttataaaggcattctggccatcaacggtgacgaccgccgcctgctgtttcagggagtccagcgtttgtacagcgctgactgggacagagaatggcatgctgatgaagaaagaaagagcgtgctggtgtttattggtgttgatttgcctgaacaggaaatccgtgacgctttcgctcgtctgacggcataa

SEQ ID NO: 8038 - protein, 328 aa, Erwinia carotovora subsp. atroseptica SCRI1043
MTQPLSSDVTKPVYVTILTGFLGAGKTTLLRHILNAEHGYKIAVIENEFGEVPIDNTLIGERASQITTLSNGCICCTKSNELADALLDLVDGVDNGTLDFDHVIIECTGMADPGPVAQTFFSHEVICERFVLDGIITLVDAAHAQQQLNQFTIAQSQIGYADRILLTKTDVASEDETLLPRLQRINARAPIYPVVHGNIDLSVLFNIDGFVLSDKLDVKTPVFRFVAPTQNNVQSIVVYLDDAVELQAVSDVMENLLLQFSDNLLRYKGILAINGDDRRLLFQGVQRLYSADWDREWHADEERKSVLVFIGVDLPEQEIRDAFARLTA

SEQ ID NO: 8039 - DNA, 984 bp, Yersinia pseudotuberculosis IP 32953
  CDS (1)..(984): transl_table=11
atgacaaagaccaatttaattaccgggtttttaggttgtggcaaaaccacgactatccggcacttactcgcacagaagccggaacatgaaaaatgggcggtgctggtcaatgaatttggtgagattggtattgatggcgctctgttggcggatagcggtgctgtcttaaaagagatcccagggggctgcatgtgctgtgttaatgggctaccgatgcaaattggcctgaacatgctgttgcagcaggcaaaactagatcgcctgctcattgagccaaccgggctgggccacccgaaacaaattctgtcattattaacgtctgatatttatcagccttggattgacttacgcgccacactttgtctgctggatgcccgccaactgagtgaaccccgctataccgaaaatgaaaatttccgtgaccaactggcggcggcagatatcattgtggccaacaagcaagacacctaccgctcggccgataacgcggtgttacaacaatggcaacaaaagcagccattatcgcggccgctgtatcatagcgaatatggcaaactcgacgtggccctgctcgaccaaccacaccgtaataaagacgaacttccttctggtacgcatcatcacggcacatcacagccaaaaggattagccgcattacgtctgaaaggggccgaaccctggcgtcgggcattaaatcgggggcaagggtatctgagctgcggctgggtatttgatgccaacaccgtttttgataccgtgccattattggagtgggtacgattgaacccagcagaacgggtaaaaggtgtcatgcgcatcccggaaggaaccttgatggttaatcgacaaggtaatgacttacaaatagacactcgccaaatacccccgctggatagccgcattgaattgattagcgccactgatattgattggaacgtattgcaacatgatttattaaaaattcgtttacgtaacggggtatga

SEQ ID NO: 8040 - protein, 327 aa, Yersinia pseudotuberculosis IP 32953
MTKTNLITGFLGCGKTTTIRHLLAQKPEHEKWAVLVNEFGEIGIDGALLADSGAVLKEIPGGCMCCVNGLPMQIGLNMLLQQAKLDRLLIEPTGLGHPKQILSLLTSDIYQPWIDLRATLCLLDARQLSEPRYTENENFRDQLAAADIIVANKQDTYRSADNAVLQQWQQKQPLSRPLYHSEYGKLDVALLDQPHRNKDELPSGTHHHGTSQPKGLAALRLKGAEPWRRALNRGQGYLSCGWVFDANTVFDTVPLLEWVRLNPAERVKGVMRIPEGTLMVNRQGNDLQIDTRQIPPLDSRIELISATDIDWNVLQHDLLKIRLRNGV

SEQ ID NO: 8041 - DNA, 1200 bp, Bacillus licheniformis ATCC 14580
  CDS (1)..(1200): transl_table=11
atgagtaaaaagattcctgtgacagtattaagcggatacctgggggcgggtaaaacgacgctgctgaatcacatattgcaaaaccgccaagggctgaaagtcgccgttattgttaatgacatgagcgaagtcaacattgatgcagggcttgtcaagcaaggcggcctgtcgaggacggatgaaaagctggtcgaaatgtcaaacggctgcatttgctgcacactcagagaggatttgctggttgaagtcgaaaagctggcgaagcagggaaatattgattatatcgtgatcgaatcgaccggtatcagcgaaccgatcccggtcgctcagacgttctcttacatcgacgaagaattgggtattgatttgacccggttctgccgcttggacacaatggtgacggttgtcgacgccaatcgtttttggcacgattttcagtcgggggacagcctgctggaccggaaagaggctgtcggcgaagaggatgaacgcgacatcgccgatctgctcatcgatcaaatcgagttctgcgatgtgctgattttgaataaatgcgaccttgtctccgaggaagatctgcaaaagcttgagaaagtgctgaaaactttgcagcctaaagcaaacatcatcagagcggtcaaaggagaggtcgatccgaaggccgtcttaaacaccggtctcttcaattttgacgaagcgagcggttcagcaggctggatcagggaattaaaccaaggacaccaccagcatacgcctgagactgaagaatacggaatatcttcgtttgtatacgaagcgcgccgtccttttcatacagagcggttttataactggattcattcgctgccggaaaacgtcgtcagggcgaaaggaatagcctggtgtgcgacgcgcaacacccttgcccttttgatgtcgcaggcgggtccttccgtgtcgctggaaccgatctcttattgggtggccgcactgtccaaaccggaacaggaacaaattctcagacagaaccctgagcttttaaaagaatggaatgaagaattcggagaccgccatacaaagctcgtctttatcggattggatctgtcgccgtctgaaattaccgcagaagcggatcgatgccttttaacagattcggagatggcggccgactggtcgcttttatctgacccgttcgattggcagattgaaagagctagataa

SEQ ID NO: 8042 - protein, 399 aa, Bacillus licheniformis ATCC 14580
MSKKIPVTVLSGYLGAGKTTLLNHILQNRQGLKVAVIVNDMSEVNIDAGLVKQGGLSRTDEKLVEMSNGCICCTLREDLLVEVEKLAKQGNIDYIVIESTGISEPIPVAQTFSYIDEELGIDLTRFCRLDTMVTVVDANRFWHDFQSGDSLLDRKEAVGEEDERDIADLLIDQIEFCDVLILNKCDLVSEEDLQKLEKVLKTLQPKANIIRAVKGEVDPKAVLNTGLFNFDEASGSAGWIRELNQGHHQHTPETEEYGISSFVYEARRPFHTERFYNWIHSLPENVVRAKGIAWCATRNTLALLMSQAGPSVSLEPISYWVAALSKPEQEQILRQNPELLKEWNEEFGDRHTKLVFIGLDLSPSEITAEADRCLLTDSEMAADWSLLSDPFDWQIERAR

SEQ ID NO: 8043 - DNA, 987 bp, Bacillus licheniformis ATCC 14580
  CDS (1)..(987): transl_table=11
atgcctataactaaaaagaaaattcctgtcgctattctcactgggtacttaggcgccgggaaaaccacacttttaaatcgaatacttacagaaaagcacaatcaaaagatcgcggttattgtcaatgagtacggagaagtcgggatagacaaccagcttgtcgttgattctgaagaagaaattttggaaatgaacaacggctgtatctgttgcacggtccgcggagatttgattcgcattctgagaacgcttgtattctcaatggatcaagggaaagttgcatttgatcgcgttttaatcgaaacaacgggactggctgatcctgcccccgttgcccagacgtttttcatggatgaactgctatccgaaatatttgaagttgacagcatcgtcacggtagtagacagcaagcatgtcaccagacatctggatgatcaggatgaagcgcaagagcaaatcgcatttgctgacgtcatcatcctcaataaaacagatttagtatcgaataacgagctgaaatccttggagcaaagacttgtcaacattaatcctacggctaagaggctgtatgccagagattgcaaggtcaatttaagagatatactggggatcaatacgttcgacgtcaatcgaaaaattgaaatcgatcctcattttctagaagatcatcatcaccaccatcacgatgataaagtgtcttctatcgcttttcgggaagagaagcctcttgatttggcaaaggtggatcattggatgagttatctcgtacgggaaaaaggagaagatttattgcgttataaagggatcctttatattaaaggcgaagaatatcgaatcgtattccaagggcttcatatgctgttttcaggacgtccggaccggaagtggaacgaaaacgagaaaaaacaaagcgaacttgttttcatcggaaaggacttggacaaagaggaactggagcggcaatttaaaaattgcatcgcaaagtaa

SEQ ID NO: 8044 - protein, 328 aa, Bacillus licheniformis ATCC 14580
MPITKKKIPVAILTGYLGAGKTTLLNRILTEKHNQKIAVIVNEYGEVGIDNQLVVDSEEEILEMNNGCICCTVRGDLIRILRTLVFSMDQGKVAFDRVLIETTGLADPAPVAQTFFMDELLSEIFEVDSIVTVVDSKHVTRHLDDQDEAQEQIAFADVIILNKTDLVSNNELKSLEQRLVNINPTAKRLYARDCKVNLRDILGINTFDVNRKIEIDPHFLEDHHHHHHDDKVSSIAFREEKPLDLAKVDHWMSYLVREKGEDLLRYKGILYIKGEEYRIVFQGLHMLFSGRPDRKWNENEKKQSELVFIGKDLDKEELERQFKNCIAK

SEQ ID NO: 8045 - DNA, 1182 bp, Bacillus licheniformis ATCC 14580
  CDS (1)..(1182): transl_table=11
atgaaggaaaacctgattccggtcactgttttaagcggttatctagggtccgggaaaacgacgctgctgcagcatgtcctgcatgaagcgcacggcttgaaaatcgccgtgatcgtcaatgatatgagcgagattaatatcgacggctccctcgtgaaaaaaggtgacctcatccgcacggatgaaaagcttgtcgaaatgcagaacggctgcatttgctgtacgctgagagacgatctgctcatcgaagtcaaaaagctggcggagaacggcggaatcgattatattctcattgaatcttccggtatcagcgagccgattcccgtcgcccaaacctttacgtacaaagatgaggagctgaatattgatttaggcaaatattgcaggcttgatacaatggtcaccgtcgtcgacggcagccgtttttttgaggacttcgcttcgggcgagagcctattggaacggaagcaggcggcagatgaaacggacagccgggaagtggccgaccttttaattgagcaaattgaatttgccgatgtcctcattttgaataaaactgatttactcaatgaagaagagcaggaaaagctgttctggtccctgagaaaactgaatccggactgcagaatcatttctgcggcattcgcaaaagtgccgctttcggccatcatgaatacgaaatcgttcgattttgaaaaagcaagtcaatcagcgggatggatcaaagagctgaatgaagagcacacacctgaaacagaggaattcggaatctcttctttcgtctatcaaaagcaaaggcctttccatcctgaaagactgaagcgctggcttgaaaactggccgccgcaaattatcagagcaaaaggcttcttctggcttgcttctcgaaatgacacagcaggccttctgtcccaggcaggctcttccctgatgatccaaagcgcgggcccctggattgcagcgtctaccgaggaagaacaaaagctcgcgtttgaagaggaccctaatttgaaagcggactgggatgaaacatacggagaccggaaaacggaaatcgtttttatcggcattgacatgaatcaggaagacattatccgctccctggatcagacccttcttacagataaagaaatgaattcagactggtcggccttacttgattcactgcctgagtatatttaa

SEQ ID NO: 8046 - protein, 393 aa, Bacillus licheniformis ATCC 14580
MKENLIPVTVLSGYLGSGKTTLLQHVLHEAHGLKIAVIVNDMSEINIDGSLVKKGDLIRTDEKLVEMQNGCICCTLRDDLLIEVKKLAENGGIDYILIESSGISEPIPVAQTFTYKDEELNIDLGKYCRLDTMVTVVDGSRFFEDFASGESLLERKQAADETDSREVADLLIEQIEFADVLILNKTDLLNEEEQEKLFWSLRKLNPDCRIISAAFAKVPLSAIMNTKSFDFEKASQSAGWIKELNEEHTPETEEFGISSFVYQKQRPFHPERLKRWLENWPPQIIRAKGFFWLASRNDTAGLLSQAGSSLMIQSAGPWIAASTEEEQKLAFEEDPNLKADWDETYGDRKTEIVFIGIDMNQEDIIRSLDQTLLTDKEMNSDWSALLDSLPEYI

SEQ ID NO: 8047 - DNA, 1188 bp, Bacillus cereus E33L
  CDS (1)..(1188): transl_table=11
atgaaaaaaatacctatcactgtattaagtgggtttttgggatccggaaaaactacattactacatcatattttaactaataagaacaacttaaaagtagctgttatcgttaatgatatgggcgaagtaaacattgatgcctcccttataaaaaaaggtggtttttcacgtacggaggaaaaactagtagaaattcaaaatggctgtatttgttgtacactacgagaagatttaataatagaagtgaatcgccttgttgaaaacggtgatattgactatatagtgattgaatcttccggtataagtgagccgattccagttgcccaaacatttacttatactgacgacgttcttaacattgatttaacgaaaaattgtcgcctcgatacgatggttacagttgtagatgcaaatagattttgggatgattttgtagatggagaaagtttattagatcgcaaacaagcaatcaatgaaaatgataatcgggaagttattgatttattaatagatcaaattgagtttgcaaatgtaattattcttaataagatagatttactagaaaaagaagatgtgatagaacttcatcaactgctacagaaattaaatcctaatgcaaaaattattgaatcttcctttagcaacgtaccactgcaagaaattttaaatacaaatgtattcaattatgaggaagccagtcaatcggcgggctggatacaagaattaaatagtgaacatcatacacccgaaacggaagaatacggtatcaattcctttgtataccgtcgtaaataccctttccatcctgaacgccttatgaattggctaggaaaatggcctgtagatgtcgtaagagcaaaaggctttttctggctcgcatctcgtaataatatgataggtcttctatctcaagcaggttcctctattacaattcaaggagccggtgaatggatagcagcattacctgaaactgaaagaaatcaaatgatcatagaagagccagaagtattgaaaaactgggataaacaatatggagatcgaataactgaactcgtatttatcggaattgatatgaaccgttctttaattgaacaatcattagatgattgtctattaacagaaaaagaaatgacacaaaactggaatacattcattgatcctattccagcttttacttacacttcataa

SEQ ID NO: 8048 - protein, 395 aa, Bacillus cereus E33L
MKKIPITVLSGFLGSGKTTLLHHILTNKNNLKVAVIVNDMGEVNIDASLIKKGGFSRTEEKLVEIQNGCICCTLREDLIIEVNRLVENGDIDYIVIESSGISEPIPVAQTFTYTDDVLNIDLTKNCRLDTMVTVVDANRFWDDFVDGESLLDRKQAINENDNREVIDLLIDQIEFANVIILNKIDLLEKEDVIELHQLLQKLNPNAKIIESSFSNVPLQEILNTNVFNYEEASQSAGWIQELNSEHHTPETEEYGINSFVYRRKYPFHPERLMNWLGKWPVDVVRAKGFFWLASRNNMIGLLSQAGSSITIQGAGEWIAALPETERNQMIIEEPEVLKNWDKQYGDRITELVFIGIDMNRSLIEQSLDDCLLTEKEMTQNWNTFIDPIPAFTYTS

SEQ ID NO: 8049 - DNA, 924 bp, Bacillus cereus E33L
  CDS (1)..(924): transl_table=11
atgaataaagtagaaattcatatattaggtggctttttaggtagtggaaaatcaacattattacaaaatttattgttagcagaaaaaaagaagaatagaaaagttgcagtattgatgaatgaaattggtgaatactcggtagataccgatattattggaaaagagaatgttttaagggaacttcttaaggggtgtatttgttgtacgttaaaagaagagcttgaaatacaattacattcgttatatcagcaagaaagaccagatgtcatttatatagaaacgacaggtgttgcgcatccaattgaagtgttagatgcatgtgtatcaccaattttagcacctttcttagaagtgaaatcaatagtagtcgttttagatgcagtaaggtggttaaatcgaagtatattaagtgcaaatgttcagcaattattatatgagcaattgaagtttggtagccacattttaattaataaatcagatttactaacatttgcggataagaacaaagtaattgaagaagtgaaagcaataaataatcatgctaaattgtttgaaacagaatattgtaatatatctttagaagacatagaagaagctgaatttacgaatgatgggaaacaagaaacactacatgtaaaacagcatttacatatacaaacaatgacatatcaatttacgaaatcgattgagcaagataatttatatgaatggctttcaaatttaccagatagtatttatcgtgtaaaaggatttgtgaaattccatggagataaatacccgcacctattccaatattcgtttggcgtaccaactttactggaacaagacttcggtttcccgacgaacttggtagtgataggggaagggctagataagaaacaattagctgaagggttagagaaagtagaacttaattctaattaa

SEQ ID NO: 8050 - protein, 307 aa, Bacillus cereus E33L
MNKVEIHILGGFLGSGKSTLLQNLLLAEKKKNRKVAVLMNEIGEYSVDTDIIGKENVLRELLKGCICCTLKEELEIQLHSLYQQERPDVIYIETTGVAHPIEVLDACVSPILAPFLEVKSIVVVLDAVRWLNRSILSANVQQLLYEQLKFGSHILINKSDLLTFADKNKVIEEVKAINNHAKLFETEYCNISLEDIEEAEFTNDGKQETLHVKQHLHIQTMTYQFTKSIEQDNLYEWLSNLPDSIYRVKGFVKFHGDKYPHLFQYSFGVPTLLEQDFGFPTNLVVIGEGLDKKQLAEGLEKVELNSN

SEQ ID NO: 8051 - DNA, 960 bp, Bacillus cereus E33L
  CDS (1)..(960): transl_table=11
atgtacgaaatgattccagtaacaatattaactggttttcttggatctgggaaaacaacattattaaatcgtattttaacagagaatcacggtaagaaattggcggtaattgtaaatgaaatagggcaaattggcattgataatcagttgattatgaatgttgaagaagaaattatggaaatgacaaacggttgtttatgctgtactgtacgggaagatttactcgttgcgttaaaacaattactggacgtaaaagcagaaggtaaaatggattttgatggattagtaattgaaacaactggccttgcaaatccaggtccaattattcaaacattctttttagatcctgtaattcaatctgcatatcaaattaacggtgttgtaacagtagtagatagttatcatatacataaacattttgaaaaaggactagaagcaaaagaacaaattgcatttgccgatgttgtattagtgaataagttagatttaattgaagagagcgaaaaagaccatctcttacatgaattgcaaggaataaatccgactgcaaagttaattcagtcgactcactgtgatgtagatattccatcgttactaaaaattcaaacgtttaaaacgaaagatacgttacaaatctatcctcataaagagcataatcatctagaaggtgtaaaatcgtttgtactacgtgaagagcgtccgttagatttacaaaaactaaatgagtggatgtcagctgtcgttcaagaactaggagaatacttatatcgctacaaagggattttatcgattgatggagtggataaacgtatcgtttttcaaggtgtacatacgttatttgctgcttcgtatgatagagagtggcaagagggtgaagatcgagtaagtgaagttgtttttatcggaaaagatattaataaagaatggttccaagaacattttgaggagtgtgtgaaataa

SEQ ID NO: 8052 - protein, 319 aa, Bacillus cereus E33L
MYEMIPVTILTGFLGSGKTTLLNRILTENHGKKLAVIVNEIGQIGIDNQLIMNVEEEIMEMTNGCLCCTVREDLLVALKQLLDVKAEGKMDFDGLVIETTGLANPGPIIQTFFLDPVIQSAYQINGVVTVVDSYHIHKHFEKGLEAKEQIAFADVVLVNKLDLIEESEKDHLLHELQGINPTAKLIQSTHCDVDIPSLLKIQTFKTKDTLQIYPHKEHNHLEGVKSFVLREERPLDLQKLNEWMSAVVQELGEYLYRYKGILSIDGVDKRIVFQGVHTLFAASYDREWQEGEDRVSEVVFIGKDINKEWFQEHFEECVK

SEQ ID NO: 8053 - DNA, 993 bp, Bacillus licheniformis ATCC 14580
  CDS (1)..(993): transl_table=11
atgatcatgcctataactaaaaagaaaattcctgtcgctattctcactgggtacttaggcgccgggaaaaccacacttttaaatcgaatacttacagaaaagcacaatcaaaagatcgcggttattgtcaatgagtacggagaagtcgggatagacaaccagcttgtcgttgattctgaagaagaaattttggaaatgaacaacggctgtatctgttgcacggtccgcggagatttgattcgcattctgagaacgcttgtattctcaatggatcaagggaaagttgcatttgatcgcgttttaatcgaaacaacgggactggctgatcctgcccccgttgcccagacgtttttcatggatgaactgctatccgaaatatttgaagttgacagcatcgtcacggtagtagacagcaagcatgtcaccagacatctggatgatcaggatgaagcgcaagagcaaatcgcatttgctgacgtcatcatcctcaataaaacagatttagtatcgaataacgagctgaaatccttggagcaaagacttgtcaacattaatcctacggctaagaggctgtatgccagagattgcaaggtcaatttaagagatatactggggatcaatacgttcgacgtcaatcgaaaaattgaaatcgatcctcattttctagaagatcatcatcaccaccatcacgatgataaagtgtcttctatcgcttttcgggaagagaagcctcttgatttggcaaaggtggatcattggatgagttatctcgtacgggaaaaaggagaagatttattgcgttataaagggatcctttatattaaaggcgaagaatatcgaatcgtattccaagggcttcatatgctgttttcaggacgtccggaccggaagtggaacgaaaacgagaaaaaacaaagcgaacttgttttcatcggaaaggacttggacaaagaggaactggagcggcaatttaaaaattgcatcgcaaagtaa

SEQ ID NO: 8054 - protein, 330 aa, Bacillus licheniformis ATCC 14580
MIMPITKKKIPVAILTGYLGAGKTTLLNRILTEKHNQKIAVIVNEYGEVGIDNQLVVDSEEEILEMNNGCICCTVRGDLIRILRTLVFSMDQGKVAFDRVLIETTGLADPAPVAQTFFMDELLSEIFEVDSIVTVVDSKHVTRHLDDQDEAQEQIAFADVIILNKTDLVSNNELKSLEQRLVNINPTAKRLYARDCKVNLRDILGINTFDVNRKIEIDPHFLEDHHHHHHDDKVSSIAFREEKPLDLAKVDHWMSYLVREKGEDLLRYKGILYIKGEEYRIVFQGLHMLFSGRPDRKWNENEKKQSELVFIGKDLDKEELERQFKNCIAK

SEQ ID NO: 8055 - DNA, 1074 bp, Burkholderia mallei ATCC 23344
  CDS (1)..(1074): transl_table=11
atgcagatgcgcaaaattcccgtgacgatcgtcacgggcttcctcggcagcggcaagacgacgctcttgcgccacatcctccagcacgcgggcggccgccggatcgtcgtgatcgtcaacgagttcggcgaactcggcatcgacggcgagatcctgaagggctgcggcgtcggctgcgacgaagccggccgcgaagtcgacggccggctctacgagctcgcgaacgggtgcctgtgctgcaccgtgcaggaagagttctatccggtgatggaacagctcgtcgagcgccgcgcgcacatcgatcacgtgctgatcgagacctccggcctcgcgctgcccaagccgctcgtgcaggcgttcaactggccgtcgatcaagaacggcttcacggtcgacgcggtgctgaccgtggtcgacgcgcccgccaccgcgcgcggccagttcgccgagaaccccaccgccgtcgacgcgcagcgccgcgcggacccgaatctcgatcacgaatcgccgctgcacgagctgttcgccgatcagctgtcgtccgccgatctcgtgatcgtcaacaagaccgatctgctcgacgacgcggcgctcgccgccgtcgaggcgacgattcgcgacgaagtcccgccgcaggtgaagctcgtgcgcgcgcggcgcggcgagctcgatctcgcgacgctgctcgggctgaacgccgcgtccgaggagacgatccatctgcggcacgatcatcacggctcggccgacgacgccgatcaccatcacgacgagttcgactcggtcgtcgtcgaggcgcgggtgagctcgcgcgaggccgcgctcggcgcgctcggcgcgctcgtcgaggcgcacgcgatctatcgcgtgaagggcttcgccgcgttgccgggcgtgccgatgcggctcgtcgtgcagggcgtcggccggcgcttcgacagctatttcgaccgccgctggcgcgacggcgaggcgcccgcgagccgcttcgtgctgatcggcgaggacctcgacgcggccgcgctgcagcgcgcgttcgacgcggcgctcgccgcgcacgggcaggccgcgtga

SEQ ID NO: 8056 - protein, 357 aa, Burkholderia mallei ATCC 23344
MQMRKIPVTIVTGFLGSGKTTLLRHILQHAGGRRIVVIVNEFGELGIDGEILKGCGVGCDEAGREVDGRLYELANGCLCCTVQEEFYPVMEQLVERRAHIDHVLIETSGLALPKPLVQAFNWPSIKNGFTVDAVLTVVDAPATARGQFAENPTAVDAQRRADPNLDHESPLHELFADQLSSADLVIVNKTDLLDDAALAAVEATIRDEVPPQVKLVRARRGELDLATLLGLNAASEETIHLRHDHHGSADDADHHHDEFDSVVVEARVSSREAALGALGALVEAHAIYRVKGFAALPGVPMRLVVQGVGRRFDSYFDRRWRDGEAPASRFVLIGEDLDAAALQRAFDAALAAHGQAA

SEQ ID NO: 8057 - DNA, 1341 bp, Burkholderia mallei ATCC 23344
  CDS (1)..(1341): transl_table=11
atgaaccagccgttgcccgtcaccgtgctgtccggcttcctcggcgccggcaagaccacgctgctcaatcacatcctcgcgaatcgcgcgggcctgaaggtcgccgtgatcgtcaacgatctcgccgcggccaacgtcgacgcgacattcgtgcgcggcgcgaccgagctgtcgcatatcgaagcgcacctcgtcgagatgtcgaacggctgcatctgctgcacgctgcgcgacgatctgctcgtcgagatccgccgcctcgcggccgaaaaccgcttcgacgcgatcgtggtcgaatcgacgggcatcgccgagccgatgccgatcgccgagaccttcacgttcgtcgacgacgacggctccgcgctcgaggacgttgcgcgtctcgatacgatggtcaccgtcatcgacgcgttcaacttcctgcacgactatgcgcgcgacgacgcgctcgcggagcacggcctcgcggcgaccgacgaagacgaccgcacgctcgtcgagctgctgatcgagcagatcgagttttgcgacgtgctcgtgatcaacaaggcggatctcgtcgacgccgacgcgctcgcgcgcctgcagcggatcctcgcgaacctgaatccgcgcgcgcggcagatcgtgagccgcttcggcgacgtgccgctcgccgaagtgatcaataccggccgcttcgatttcgacgcggccgcgaacgcgccgggctggctcgcgtcgctcgagcatcggcgcgacgccgatgaagccgaatgcggccaaggccaaagccaaggcgacggctgcgtgcacagcgaggccgatgaatacggcatcggccacttcgtctatcgcgcgcgccggccgttccatccgcagcggctctgggcgctcctgcacgaagagtggaagggcgtgctgcgcagcaaggggtttttctggctcgcgacgcgcaacgacatcgcgggttcgctgtcgcaggcgggcggcgtgtgccggcacggtccggccggccactggtgggcggcgcaggatcgcaccgaatggccggaggcgggcgacgagctgtacgacgagatcgtcgccgactggcacggcgagctcgccgacacgtcgatcggcgatcggcgccaggagctcgtactgatcggcatcgggctcgatgcggcggcgtggcgcgcgaagttcgacgcgtgcctgctcaccggcgcggagtacgcgcaaggcaagcaggcgtgggcgggctacgcggatccgttcccggcatgggacgtcgatgatcacgatcacgaccatgcgcatgaccaccatgatcacgaccacggcgacgactcggaaatcgtccaccgccactga

SEQ ID NO: 8058 - protein, 446 aa, Burkholderia mallei ATCC 23344
MNQPLPVTVLSGFLGAGKTTLLNHILANRAGLKVAVIVNDLAAANVDATFVRGATELSHIEAHLVEMSNGCICCTLRDDLLVEIRRLAAENRFDAIVVESTGIAEPMPIAETFTFVDDDGSALEDVARLDTMVTVIDAFNFLHDYARDDALAEHGLAATDEDDRTLVELLIEQIEFCDVLVINKADLVDADALARLQRILANLNPRARQIVSRFGDVPLAEVINTGRFDFDAAANAPGWLASLEHRRDADEAECGQGQSQGDGCVHSEADEYGIGHFVYRARRPFHPQRLWALLHEEWKGVLRSKGFFWLATRNDIAGSLSQAGGVCRHGPAGHWWAAQDRTEWPEAGDELYDEIVADWHGELADTSIGDRRQELVLIGIGLDAAAWRAKFDACLLTGAEYAQGKQAWAGYADPFPAWDVDDHDHDHAHDHHDHDHGDDSEIVHRH

SEQ ID NO: 8059 - DNA, 1077 bp, Burkholderia mallei ATCC 23344
  CDS (1)..(1077): transl_table=11
atggccattcccgtcaccatcctcacgggctttctcggcagcggcaagaccacgctgctcaagcgcatcctgaacgaacagcacggcatgaagatcgccgtgatcgaaaacgagttcggcgaagagaacatcgacaacgagatcctcgtccaggattcgaccgagcagatcatccagatgagcaacggctgcatctgctgcacgattcgcggcgacctcgcgcgcgcgctcgccgacctcgccgcgaaaaagcgcgacggcacgttcgacttcgaccgcgtggtgatcgagacgacgggcctcgcgaatccgggcccggtcgcgcagacgttcttcatcgacagcgagatcgccgacgaattcctgctcgacgcggtcatcacgctcgtcgacgcgaagcatgcgaacgcgcagctcgacgagcacgaagtcgtgcagcgccaggtcggcttcgccgatcgcctgttcatcacgaaggcggacctcgtcgacgacgaggcggtgtccgagctcaagcaccgcctgctgcacatgaacccgaaggcggcgatcaaggtcgtgaacttcggcgatgcggacatcaaggagatcttcgacctgcgcggcttcaacctgaacgcgaagctcgagatcgatccggacttcctcgcggaagacgatcacgcgcacgcgcatcacgacgatcacgaccacgatcacgcgcattgcgatcacgatcacggccattgcgagcacgatcacgggcacggccaccacgatcatcaccacgcgcaccacgacgacaagatcaagtcgttcgtctaccgcaacgatcgcccgttcgatccgaacaagctcgaggatttcctcggcggcattctgcagatctacggcgagcggatgctgcgctacaagggcgtgctgtacatgaagggcgtcgaccgcaaggtcgtgttccagggcgtgcatcagatgatgggcagcgatctcgccgcgaagtggctgccggccgagaagaagaccaacaagatggtgttcatcggcgtcgacctgccgcgcgacctcatcaccgacggcctcgacgcctgcctcgcataa

SEQ ID NO: 8060 - protein, 358 aa, Burkholderia mallei ATCC 23344
MAIPVTILTGFLGSGKTTLLKRILNEQHGMKIAVIENEFGEENIDNEILVQDSTEQIIQMSNGCICCTIRGDLARALADLAAKKRDGTFDFDRVVIETTGLANPGPVAQTFFIDSEIADEFLLDAVITLVDAKHANAQLDEHEVVQRQVGFADRLFITKADLVDDEAVSELKHRLLHMNPKAAIKVVNFGDADIKEIFDLRGFNLNAKLEIDPDFLAEDDHAHAHHDDHDHDHAHCDHDHGHCEHDHGHGHHDHHHAHHDDKIKSFVYRNDRPFDPNKLEDFLGGILQIYGERMLRYKGVLYMKGVDRKVVFQGVHQMMGSDLAAKWLPAEKKTNKMVFIGVDLPRDLITDGLDACLA

SEQ ID NO: 8061 - DNA, 1341 bp, Burkholderia pseudomallei K96243
  CDS (1)..(1341): transl_table=11
atgaaccagccgttgcccgtcaccgtgctgtccggcttcctcggcgccggcaagaccacgctgctcaatcacatcctcgcgaatcgcgcgggcctgaaggtcgccgtgatcgtcaacgatctcgccgcggccaacgtcgacgcgacattcgtgcgcggcgcgaccgagctgtcgcatgtcgaagcgcacctcgtcgagatgtcgaacggctgcatctgctgcacgctgcgcgacgatctgctcgtcgagatccgccgcctcgcggccgaaaaccgcttcgacgcgatcgtggtcgaatcgacgggcatcgccgagccgatgccgatcgccgagaccttcacgttcgtcgacgacgacggctccacgctcgaggacgttgcgcgtctcgatacgatggtcaccgtcatcgacgcgttcaacttcctgcacgactatgcgcgcgacgacgcgctcgcggagcacggcctcgcggcgaccgacgaagacgaccgcacgctcgtcgagctgctgatcgagcagatcgagttttgcgacgtgctcgtgatcaacaaggcggatctcgtcgacgccgacgcgctcgcgcgcctgcagcggatcctcgcgaacctgaatccgcgcgcgcagcagatcgtgagccgcttcggcgacgtgccgctcgccgaagtgatcaataccggccgcttcgatttcgacgcggccgcgaacgcgccgggctggctcgcgtcgctcgagcatcggcgcgacgccgatgaagccgaatgcggccaaggccaaagccaaggcgacggccgcgtgcacagcgaggccgatgaatacggcatcggccacttcgtctatcgcgcgcgccggccgttccatccgcagcggctctgggcgctcctgcacgaagagtggaagggcgtgctgcgcagcaaggggtttttctggctcgcgacgcgcaacgacatcgcgggttcgctgtcgcaggcgggcggcgtgtgccggcacggtccggccggccactggtgggcggcgcaggatcgcaccgaatggccggaggcgggcgacgagctgtacgacgagatcgtcgccgactggcacggcgagctcgccgacacgtcgatcggcgatcggcgccaggagctcgtactgatcggcatcgggctcgatgcggcggcgtggcgcgcgaagttcgacgcgtgcctgctcaccggcgcggagtacgcgcaaggcaagcaggcgtgggcgggctacgcggatccgttcccggcatgggacgtcgatgatcacgatcacgaccatgcgcatgaccaccatgatcacgaccacggcgacgactcggaaatcgtccaccgccactga

SEQ ID NO: 8062 - protein, 446 aa, Burkholderia pseudomallei K96243
MNQPLPVTVLSGFLGAGKTTLLNHILANRAGLKVAVIVNDLAAANVDATFVRGATELSHVEAHLVEMSNGCICCTLRDDLLVEIRRLAAENRFDAIVVESTGIAEPMPIAETFTFVDDDGSTLEDVARLDTMVTVIDAFNFLHDYARDDALAEHGLAATDEDDRTLVELLIEQIEFCDVLVINKADLVDADALARLQRILANLNPRAQQIVSRFGDVPLAEVINTGRFDFDAAANAPGWLASLEHRRDADEAECGQGQSQGDGRVHSEADEYGIGHFVYRARRPFHPQRLWALLHEEWKGVLRSKGFFWLATRNDIAGSLSQAGGVCRHGPAGHWWAAQDRTEWPEAGDELYDEIVADWHGELADTSIGDRRQELVLIGIGLDAAAWRAKFDACLLTGAEYAQGKQAWAGYADPFPAWDVDDHDHDHAHDHHDHDHGDDSEIVHRH

SEQ ID NO: 8063 - DNA, 1113 bp, Burkholderia pseudomallei K96243
  CDS (1)..(1113): transl_table=11
ttgaccccgtttcacgaaccacaggcgaccgacgacatggccattcccgtcaccatcctcacgggctttctcggcagcggcaagaccacgctgctcaagcgcatcctgaacgaacagcacggcatgaagatcgccgtgatcgaaaacgagttcggcgaagagaacatcgacaacgagatcctcgtccaggattcgaccgagcagatcatccagatgagcaacggctgcatctgctgcacgattcgcggcgacctcgcgcgcgcgctcgccgacctcgccgcgaaaaagcgcgacggcacgttcgacttcgaccgcgtggtgatcgagacgacgggcctcgcgaatccgggcccggtcgcgcagacgttcttcatcgacagcgagatcgccgacgaattcctgctcgacgcggtcatcacgctcgtcgacgcgaagcatgcgaacgcgcagctcgacgagcacgaagtcgtgcagcgccaggtcggcttcgccgatcgcctgttcatcacgaaggcggacctcgtcgacgacgaggcggtgtccgagctcaagcaccgcctgctgcacatgaacccgaaggcggcgatcaaggtcgtgaacttcggcgatgcggacatcaaggagatcttcgacctgcgcggcttcaacctgaacgcgaagctcgagatcgatccggacttcctcgcggaagacgatcacgcgcacgcgcatcacgacgatcacgaccacgatcacgcgcattgcgatcacgatcacggccattgcgagcacgatcacgggcacggccaccacgatcatcaccacgcgcaccacgacgacaagatcaagtcgttcgtctaccgcaacgatcgcccgttcgatccgaacaagctcgaggatttcctcggcggcattctgcagatctacggcgagcggatgctgcgctacaagggcgtgctgtacatgaagggcgtcgaccgcaaggtcgtgttccagggcgtgcatcagatgatgggcagcgatctcgccgcgaagtggctgccggccgagaagaagaccaacaagatggtgttcatcggcgtcgacctgccgcgcgacctcatcaccgacggcctcgacgcctgcctcgcataa

SEQ ID NO: 8064 - protein, 370 aa, Burkholderia pseudomallei K96243
MTPFHEPQATDDMAIPVTILTGFLGSGKTTLLKRILNEQHGMKIAVIENEFGEENIDNEILVQDSTEQIIQMSNGCICCTIRGDLARALADLAAKKRDGTFDFDRVVIETTGLANPGPVAQTFFIDSEIADEFLLDAVITLVDAKHANAQLDEHEVVQRQVGFADRLFITKADLVDDEAVSELKHRLLHMNPKAAIKVVNFGDADIKEIFDLRGFNLNAKLEIDPDFLAEDDHAHAHHDDHDHDHAHCDHDHGHCEHDHGHGHHDHHHAHHDDKIKSFVYRNDRPFDPNKLEDFLGGILQIYGERMLRYKGVLYMKGVDRKVVFQGVHQMMGSDLAAKWLPAEKKTNKMVFIGVDLPRDLITDGLDACLA

SEQ ID NO: 8065 - DNA, 1074 bp, Burkholderia pseudomallei K96243
  CDS (1)..(1074): transl_table=11
atgcagatgcgcaaaattcccgtgacgatcgtcacgggcttcctcggcagcggcaagacgacgctcttgcgccacatcctccagcacgcgggcggccgccggatcgtcgtgatcgtcaacgagttcggcgaactcggcatcgacggcgagatcctgaagggctgcggcgtcggctgcgacgaagccggtcgcgaagtcgacggccggctctacgagctcgcgaacgggtgcctgtgctgcaccgtgcaggaagagttctatccggtgatggagcagctcgtcgagcgccgcgcgcacatcgatcacgtgctgatcgagacctccggcctcgcgctgcccaagccgctcgtgcaggcgttcaactggccgtcgatcaagaacggcttcacggtcgacgcggtgctgaccgtggtcgacgcgcccgccaccgcgcgcggccagttcgccgagaaccccgccgccgtcgacgcgcagcgccgcgcggacccgaatctcgatcacgaatcgccgctgcacgagctgttcgccgatcagctgtcgtccgccgatctcgtgatcgtcaacaagaccgatctgctcgacgacgcggcgctcgccgccgtcgaggcgacgattcgcgacgaagtcccgccgcaggtgaagctcgtgcgcgcgcggcgcggcgagctcgatctcgcgacgctgctcgggctgaacgccgcgtccgaggagacgatccatctgcggcacgatcatcacggctcggccgacgacgccgatcaccatcacgacgagttcgactcggtcgtcgtcgaggcgcgggtgagctcgcgcgaggccgcgctcggcgcgctcggggcgctcgtcgaggcgcacgcgatctatcgcgtgaagggcttcgccgcgttgccgggcgtgccgatgcggctcgtcgtgcagggcgtcggccggcgcttcgacagctatttcgaccgccgctggcgcgacggcgaggcgcccgcgagccgcttcgtgctgatcggcgaggacctcgacgcggccgcgctgcagcgcgcgttcgacgcggcgctcgccgcgcacgggcaggccgcgtga

SEQ ID NO: 8066 - protein, 357 aa, Burkholderia pseudomallei K96243
MQMRKIPVTIVTGFLGSGKTTLLRHILQHAGGRRIVVIVNEFGELGIDGEILKGCGVGCDEAGREVDGRLYELANGCLCCTVQEEFYPVMEQLVERRAHIDHVLIETSGLALPKPLVQAFNWPSIKNGFTVDAVLTVVDAPATARGQFAENPAAVDAQRRADPNLDHESPLHELFADQLSSADLVIVNKTDLLDDAALAAVEATIRDEVPPQVKLVRARRGELDLATLLGLNAASEETIHLRHDHHGSADDADHHHDEFDSVVVEARVSSREAALGALGALVEAHAIYRVKGFAALPGVPMRLVVQGVGRRFDSYFDRRWRDGEAPASRFVLIGEDLDAAALQRAFDAALAAHGQAA

SEQ ID NO: 8067 - DNA, 1143 bp, Nocardia farcinica IFM 10152
  CDS (1)..(1143): transl_table=11
gtgtcgcacggcggcctcctggtcgccggcctcggccggtgcggcgcgggcggcgcccgcgaccgctggctcacacctgccgcgggcggcccggtggcggcgcctagggtggtcggggtgagcgagcggattcctgtgctgatcgtggccggctttctcggcgccgggaagaccaccatgctcaaccacctgctgcgtgacgacagcggcacgcggatcggtgtggtggtcaacgacttcggcgccgtcaacatcgacgcgatgctggtcgccgggcaggtcgacgcgatggtctcgctcggcaacggctgtgtgtgctgcgcgatcgacgtgagcgaactggacgagatgttcgagcggctgacccagccgcaggccggcatcgacgtcatcgtggtggaagccagcggcctggccgagccgggcaatctgatccggatggtgctgggcagcgagaacccgcgcatccgctacggcgggctgatcgaggtggtcgacgccgagcagttcccggacagccgggcccgccaccccgagctggccggtcacctgcgcatggccgatctggtggtgctcaacaaggccgatcgggtcgagcccggcgtgctcgaccggctgcgggccgagatcgccgagcacgcccgcggtgtcccggtgtacgcgaccgcgcacggccgcatcgatccggccctgctgttcgacccgcccgcgcgtgagcgcacaccggtggccgagcagctcagcttcgacgagttgtggcgcgagcacgaccacggcgaccccgggcaccggcatctgcacgacgactacaccagcgtgtcgttcaccagcgaccgagatctgcacccgcgcaggctgatcggcgtcctggaggatccgccgcccgggctgttccgcgccaagggcgtgctcgcgttcgccggtgaccaccgcaagttcaccctgcacgtggtgggcaggcacatccgcctcgagccgcagtcctggcggcgcgacgaggcacgcgcgagctccctcgtgctcatcggcgcgggcctgcccgcggacacggcgctggcgcggttgcgcgacaccgtgcacgccgagcccgagccgccggacgagcaggccatgctcggcgtgtggcggtacgtgccgcactga

SEQ ID NO: 8068 - protein, 380 aa, Nocardia farcinica IFM 10152
MSHGGLLVAGLGRCGAGGARDRWLTPAAGGPVAAPRVVGVSERIPVLIVAGFLGAGKTTMLNHLLRDDSGTRIGVVVNDFGAVNIDAMLVAGQVDAMVSLGNGCVCCAIDVSELDEMFERLTQPQAGIDVIVVEASGLAEPGNLIRMVLGSENPRIRYGGLIEVVDAEQFPDSRARHPELAGHLRMADLVVLNKADRVEPGVLDRLRAEIAEHARGVPVYATAHGRIDPALLFDPPARERTPVAEQLSFDELWREHDHGDPGHRHLHDDYTSVSFTSDRDLHPRRLIGVLEDPPPGLFRAKGVLAFAGDHRKFTLHVVGRHIRLEPQSWRRDEARASSLVLIGAGLPADTALARLRDTVHAEPEPPDEQAMLGVWRYVPH

SEQ ID NO: 8069 - DNA, 1167 bp, Nocardia farcinica IFM 10152
  CDS (1)..(1167): transl_table=11
atgattaccatttacaggatgacgacttcatcgccttccgacctgctgcccgtcaccgtgctctccggattcctcggcgcgggtaagaccaccctgctcaaccacatcctcgccaaccgggagggtcgccgcgtcgcggtgatcgtcaacgacatgagcgaggtgaacatcgacgcggcgctcgtcgcgggccagggccacctggaccgcaccgaggagaagctggtggaactgaccaacggctgcatctgctgcaccctgcgcgaggacctcatcgagtcggtgggcaagctcgcgcgcgagggccgcttcgaccagctggtcatcgagtcgaccggcatctccgagccgatgccggtggcggcgagcttcgaatgggaattcgaggacgggttccgcctcggcgacctcgcgcggctggacacgatggtcaccgtggtggacgcctcgaccttcctggccgaggtggtgcgcggccacacgctggcctcgcgggatctccaggccggggagggcgacgagcgcaccatcgccgacctgctcgtcgaccaggtggaattcgccgacgtgctgttgctcaacaagaccgatctggtcagcgagaacgccgcgggcaccgtcgaggccaccctgcggcggatgaacccgcgcgcccgtgtgctgcgcaccgcacacggcgtggtcgatctcgccgaagtgctcggcaccgggcgctacaacccggtgctggccgccgcatccgagggctggaccgaggaactggcgggcgggcatgttcccgagaccgaggagtacggcatccgcagcctcaccttcaccgccgagcggccgttccatccagcgcgcctggcggccgtgctcgaccagctgcgggggctgttgcgcagcaagggtttctgctggatcgccagccgcagccagttcgccgcgctctggtcgcaggccggtccgaacctcagcttcgaaccggcctcctggtggtcggcgttggacatcccgccgggccaggagatcgtcttcatcggtgtgaagctcgacgtcgacgggctgcgtgcccagctggccgacgcgctgctcaccgacgccgagttcgccgcgggcccggccgcctgggcgacctacccggatccgtttccggcgtggggcgagctgcacgagcacgcctga

SEQ ID NO: 8070 - protein, 388 aa, Nocardia farcinica IFM 10152
MITIYRMTTSSPSDLLPVTVLSGFLGAGKTTLLNHILANREGRRVAVIVNDMSEVNIDAALVAGQGHLDRTEEKLVELTNGCICCTLREDLIESVGKLAREGRFDQLVIESTGISEPMPVAASFEWEFEDGFRLGDLARLDTMVTVVDASTFLAEVVRGHTLASRDLQAGEGDERTIADLLVDQVEFADVLLLNKTDLVSENAAGTVEATLRRMNPRARVLRTAHGVVDLAEVLGTGRYNPVLAAASEGWTEELAGGHVPETEEYGIRSLTFTAERPFHPARLAAVLDQLRGLLRSKGFCWIASRSQFAALWSQAGPNLSFEPASWWSALDIPPGQEIVFIGVKLDVDGLRAQLADALLTDAEFAAGPAAWATYPDPFPAWGELHEHA

SEQ ID NO: 8071 - DNA, 993 bp, Photobacterium profundum SS9
  CDS (1)..(993): transl_table=11
atgaaacgcattcctactaatatcatcacgggctttttgggtgctggtaaaacgacctctattttatctttactggctcgcaaacctgaaaatgaaaaatgggcagtattgattaatgaatttggcaacgtcggcgtcgatggtgcaatcctttctcaacaaggtgcgatcattaaagaagtgccggggggttgtatgtgttgtgtcgcaggcctgcctatgtctgtcggtattaatgctttattagcacaaaaacctgaccgtttattactcgaaccgacaggtttgggtcaccccaaagaagtcatcaggaagcttacctcgggtatgtataaagattacatcgaccttcgtgcaaccattactgttgttgatcctcgccattttgctgataccgcgtataccgacaattcaaatttccaagatcagctcgcgcttgccgatgtggttgtcgccaacaaaatcgatgaaagtacagagtatgacctcatcgcgtttgaacattttattgaaagctgccaacctgcaaaagcagcgattggtaaggttcagcaaggtgagcttgagcttagttggctagacgttgaacgcctagaacgagaagcgcaacatagccaccatcatcaccactcagacagtgccgacatggcaccgttacccgattttgaattagccccagggcaagtttttattcgtaaggaaaatagcggccaaggctatcgcagctgtggctggttttttgctgccgatcaaattttcgatttctcccagttatttacactattctcaaagataagtgcccaacgcgttaaagccgttgtgaacactgagcgtggttgtattgcctttaacgtggtaaaccaagtggtatctgtaaatgaattatcgttagatggctttgaatcacgtatcgagtttatcgacaaagagcttctgccttgggatgaactagaaagcattctctgctcaataattagaaaagagtctttataa

SEQ ID NO: 8072 - protein, 330 aa, Photobacterium profundum SS9
MKRIPTNIITGFLGAGKTTSILSLLARKPENEKWAVLINEFGNVGVDGAILSQQGAIIKEVPGGCMCCVAGLPMSVGINALLAQKPDRLLLEPTGLGHPKEVIRKLTSGMYKDYIDLRATITVVDPRHFADTAYTDNSNFQDQLALADVVVANKIDESTEYDLIAFEHFIESCQPAKAAIGKVQQGELELSWLDVERLEREAQHSHHHHHSDSADMAPLPDFELAPGQVFIRKENSGQGYRSCGWFFAADQIFDFSQLFTLFSKISAQRVKAVVNTERGCIAFNVVNQVVSVNELSLDGFESRIEFIDKELLPWDELESILCSIIRKESL

SEQ ID NO: 8073 - DNA, 1302 bp, Haloarcula marismortui ATCC 43049
  CDS (1)..(1302): transl_table=11
atgcgcgacacaattcccgtcacgattctctccggaagcctcggggccgggaagacgacgctactgaaccatctgctgactgaggccggtgaccgcgacatcgccgtcctcgtcaacgacatggggacggtaaacgtcgacgcggaactcatcgccgaggggtccgaactcgacgtcgacgacggggtcgcggagctgtcgaacggctgtatctgctgtgaactgcaggacgacctcgaaaccgcagtcgtccggctggcggacgaccgtgacttcgacgcgctggtcgtcgagtcctctggcatctccgagccagcgcccgtcgcgcggctgttcacaaccgaatcgcgcgtggcggcgctctatcgcgtcgacacgctcgtgacggtactcgacacccggctgtttctcgactcgttcgccggcgagacgccggaacgccgcggaagcggcgaagcgagtgccgatggagacggcgacgacacagaagccgacggagccgaccgcccgctttcggacctcatggtcgaacaggtcgaactctcgaacctcgtcgtgctgaacaaaacggacctctgtacggacgaggaaatggacgaagccgaggaactggtgcgggcgctccagcccgacgccgagaccatccgaacgaccttctcacaggttgaccccgaccggctgttcgaccgcgcactgttcgaccagaccgaaatcagcgacctgccgggctggaagcgagcgctggccgaaagcgggcacggtcacggtgaaggcagtcacgaccacggcggcgacagccacgaaaccgatgcccacgaaggcgacactggccacggacacgacgaccaccaccatcccgaggaggtgtacggggtcacgtccttcacctaccgccgccgccggccgttccaccccgaccggctcgccgaggtactgcaggacctgccgtcgggcgtcgtccgttcgaaggggaccgtctggctggcgggcagcgagcgacgggtcgtcatcggccaggccggtccttcgatacgggcggaagcacagggaccatggattgcgagtctccccgaagtcgagcaggatatgtaccgctcgaaccgaccagagcttgactggcacgacgagcatggcgatcgccggacggagctggtgttcatcgggacggactacgacgaaagcgcccttcggacggcactggacgacgcgctggtgacagacgaagaatggacggagagtgagtcactcactggaccgttcccggcggagcagggcgaggaggcggtgattcggagcccctag

SEQ ID NO: 8074 - protein, 433 aa, Haloarcula marismortui ATCC 43049
MRDTIPVTILSGSLGAGKTTLLNHLLTEAGDRDIAVLVNDMGTVNVDAELIAEGSELDVDDGVAELSNGCICCELQDDLETAVVRLADDRDFDALVVESSGISEPAPVARLFTTESRVAALYRVDTLVTVLDTRLFLDSFAGETPERRGSGEASADGDGDDTEADGADRPLSDLMVEQVELSNLVVLNKTDLCTDEEMDEAEELVRALQPDAETIRTTFSQVDPDRLFDRALFDQTEISDLPGWKRALAESGHGHGEGSHDHGGDSHETDAHEGDTGHGHDDHHHPEEVYGVTSFTYRRRRPFHPDRLAEVLQDLPSGVVRSKGTVWLAGSERRVVIGQAGPSIRAEAQGPWIASLPEVEQDMYRSNRPELDWHDEHGDRRTELVFIGTDYDESALRTALDDALVTDEEWTESESLTGPFPAEQGEEAVIRSP

SEQ ID NO: 8075 - DNA, 987 bp, Salmonella enterica subsp. enterica serovar Paratyphi A str. ATCC
  CDS (1)..(987): transl_table=11
gtgaccaaaaccaatcttattactggatttctcggtagcggaaaaaccacctctatccttcatttattagctcataaagatccggctgaaaagtgggccgtcctggttaatgaatttggtgaagtgggtattgacggcgcgctgcttgccgacagcggcgcactgctaaaagagattcccggcggctgcatgtgctgcgtcaacggattgcctatgcaggtggggctcaacacgctgctgcgccagggcaaacctgaccggttgctgattgaaccaaccggactggggcacccaaaacagattctggatttattaactgcgccagtttatgagccgtggattgatttacgcgccacgctctgcatcctggaccctcgcctgctactggaccaacagagcgtcgccaatgaaaatttccgcgatcagctcgcctcagccgatattatcatcgccaataaaaccgaccgcgccacggcgcagagcgatgccgccctgcaacagtggtggcgacagtacgacggcgatcgtcaactgattcatgccgaacatggacagatagatggtaagcttctggatttaccgcgacaaaatctggcggaactgccggccagcgccgcgcattctcacactcatgccagtaaaaaaggactcgccgcgctaaatctgcccgcacagcagcgctggcgacgcagcctcaatagcggacagggtcatcaggcctgcggctggattttcgatgccgataccgtgtttgacaccattggcctcctcgaatgggctcgtctggcgccggtgggccgggtgaaaggcgttatgcgcatacaagaggggctggtacgcatcaatcgccagggcgatgacctgcacatcgaaacacagagtgtcgcgccgccggatagccgggttgaacttatctcaaacacagaaaccgactggaatacgttacagacggccttgttgaagcttcgtttagcgacgcacgcgtaa

SEQ ID NO: 8076 - protein, 328 aa, Salmonella enterica subsp. enterica serovar Paratyphi A str. ATCC
MTKTNLITGFLGSGKTTSILHLLAHKDPAEKWAVLVNEFGEVGIDGALLADSGALLKEIPGGCMCCVNGLPMQVGLNTLLRQGKPDRLLIEPTGLGHPKQILDLLTAPVYEPWIDLRATLCILDPRLLLDQQSVANENFRDQLASADIIIANKTDRATAQSDAALQQWWRQYDGDRQLIHAEHGQIDGKLLDLPRQNLAELPASAAHSHTHASKKGLAALNLPAQQRWRRSLNSGQGHQACGWIFDADTVFDTIGLLEWARLAPVGRVKGVMRIQEGLVRINRQGDDLHIETQSVAPPDSRVELISNTETDWNTLQTALLKLRLATHA

SEQ ID NO: 8077 - DNA, 1071 bp, Azoarcus sp. EbN1
  CDS (1)..(1071): transl_table=11
atgacgcagatcacgacgcccgttacggtcattaccgggttcctcggtagcgggaagacgacactcgtcaaccgcatactgcaggagttgcacggcgagcgtgtcgcggtgattgaaaacgagttcggtgcggtcggcgtcgatgcagagtttcttataacggatggtaacgaaacagtcattcagctcgccaacggttgcttgtgctgtactgtgcgaggcgactttgcgcgcgccctgaacacgctaagcgagagcagtgaggcagagggatttgtatttgatcgagtcctgattgaaacaacgggtatagccgatccgggaccgattgttcaaacattcctcgcggaaacgacgattctgacgcggttccaccttgacggtgttgtcacgctcgtcgatagcgtgcatgcacttgcgcaactcgacatgactgaaaatcgggcgcaggtggcctatgccgaccgattgcttttaaccaaattcgacctcgctacggagtcgcagatcgaagcgattggcagacgcgtggcagaaatgaatccgcgggcagagctactctccgtggatttgcacaacgcgcctatcgtggacgtcctgaatcacttgttcgatacacatgggtacacctttgactatgtgccgcgtaaggaactgactcagatcaagcggcgtcggccggcgacggataagagattttgtcttgcggcgcctacgtcacgccacaccagcgatatagtgtcttatatcttcgagtccagtgtcccgctcgatctggagcggttgaacgtgttttttgacatggcgcagcggcgctacggtccccggctatggcgctacaagggcattgtttgggccgcgcatcagcgcccacgtctcgtcgttcagggggtgcagagtcttctccagatcacaggtggaacgatctggcgcacctttgagccgcggcaaactttgctgatattcattggacaggcgattgatccagcatggattgaagaaatgcttaggcgctgcgaagttgattcagtcgacaaccggaataaactaacacgtgggcagctcgaataa

SEQ ID NO: 8078 - protein, 356 aa, Azoarcus sp. EbN1
MTQITTPVTVITGFLGSGKTTLVNRILQELHGERVAVIENEFGAVGVDAEFLITDGNETVIQLANGCLCCTVRGDFARALNTLSESSEAEGFVFDRVLIETTGIADPGPIVQTFLAETTILTRFHLDGVVTLVDSVHALAQLDMTENRAQVAYADRLLLTKFDLATESQIEAIGRRVAEMNPRAELLSVDLHNAPIVDVLNHLFDTHGYTFDYVPRKELTQIKRRRPATDKRFCLAAPTSRHTSDIVSYIFESSVPLDLERLNVFFDMAQRRYGPRLWRYKGIVWAAHQRPRLVVQGVQSLLQITGGTIWRTFEPRQTLLIFIGQAIDPAWIEEMLRRCEVDSVDNRNKLTRGQLE

SEQ ID NO: 8079 - DNA, 897 bp, Silicibacter pomeroyi DSS-3
  CDS (1)..(897): transl_table=11
atgacgccgcttccggtcaccgtcatcggcggctatctgggtgccggcaagacgacgctggtcaatcacctgttgcgccatgcggcggggcgccggctggcggtactggtcaacgaattcggcgacctgcccatcgacgccgacctgatcgaggccgaagaggacggcatgatctcgatcgcggggggctgcatctgctgttccttcggcagcgacctgatcggcgcgctcaacgatctggcggcgatggagccgcgtcccgaccatatcctggtggaaagctcgggcgtcgcgatccccggtgccatcgtgtcgaccatgctgctggccgatggtatccgatccgacgggatcgtggtggtggtggacggcgaaaccgtgcgccagcgcgcacaggacgattatgtcggcgacaccatcacccggcagctttcggatgccgagatcgttgtggtgaacaagaccgatctgctagcgcatgcggtgcaaaccgagttgatggaatggctggccgaggccgcccccggcgccatcgccatcccggctgaacgcggccgggtggcacccggcgcgttgctgggtgtgctgcccgcccccggcacgggccagcccgcccaccattccgaccgcctgtttgacagtctggtcttggccccggaaggtggccagccgatcgagcggctggcgcgcgacctggccactggcccccatggggtgatccgcgccaaaggctatctgcgcgatatcgaaggggcattgtggctgatccagaccgtgggccgccgctgggaggtcacccccgcgcaaggcccgcaccagacgggccttgtctgtatcggttttcgcgaccgcctggaccgcagtggcctggccgcgctggccggggccacggtctga

SEQ ID NO: 8080 - protein, 298 aa, Silicibacter pomeroyi DSS-3
MTPLPVTVIGGYLGAGKTTLVNHLLRHAAGRRLAVLVNEFGDLPIDADLIEAEEDGMISIAGGCICCSFGSDLIGALNDLAAMEPRPDHILVESSGVAIPGAIVSTMLLADGIRSDGIVVVVDGETVRQRAQDDYVGDTITRQLSDAEIVVVNKTDLLAHAVQTELMEWLAEAAPGAIAIPAERGRVAPGALLGVLPAPGTGQPAHHSDRLFDSLVLAPEGGQPIERLARDLATGPHGVIRAKGYLRDIEGALWLIQTVGRRWEVTPAQGPHQTGLVCIGFRDRLDRSGLAALAGATV

SEQ ID NO: 8081 - DNA, 1056 bp, Silicibacter pomeroyi DSS-3
  CDS (1)..(1056): transl_table=11
atgagcacccttgaaaaacttcccgttaccgtgatcaccggctttctcggcgcgggcaagaccacgctgatccgccacctgatgcagaacccgcagggcaagcggctggccgtcgtggtcaacgaattcggcgatgtgggcgtcgatggcgagatcctgaaaagctgcgccatcccggaatgcccggcggaaaacatcatggaactggccaatggctgcatctgctgcaccgtggccgatgatttcatccctaccatcgaggcgctgatggcgctggagccgcgccccgatcacatcctgatcgagacctcgggtcttgcgttgccgaaaccgctgctcaaggcgttcgactggcccgatatccgctcgaagatcactgtggatggtgtgatcgcgctggccgatgccgaggcggtggcggcgggccgcttcgcgcccaatgtggccgcggtggatgctcagcgtctggcggatgactcgattgaccatgaaacgcccctgtccgaggtgttcgaggatcagatcagctgcgccgatatcatcctgctgaccaagcccgatctggccggccccgagggcgtggcccgcgcgcgcgaggtgatcgcggccgaggcgccccgcccgctgccggtggtcgaagtggccgagggcgcggtggatgtgcgtgtcatcctgggccttggcgccgctgcggaggacgacatggacgcgcgccccagccatcacgacggccatgacgaccacgagcatgacgatttcgaaagcatcgtggtggaactgcccgaacagtccgacccggccgaactggtcgcgcggatcgagcggctggccaacgagctgaacatcctgcgggtcaagggctatgccgctgttgcgggcaagcccatgcgcctgctggtgcaggcggtgggcgcgcgggtgcgtcaccagtatgaccgcccgtggcagccgggcgaggagcgccgctcgcgcatggtggtgatcgccgagcatcacgatatcgacccggccgcgatcaatgccatcctgaccggcgtttccgagcctgcggagtaa

SEQ ID NO: 8082 - protein, 351 aa, Silicibacter pomeroyi DSS-3
MSTLEKLPVTVITGFLGAGKTTLIRHLMQNPQGKRLAVVVNEFGDVGVDGEILKSCAIPECPAENIMELANGCICCTVADDFIPTIEALMALEPRPDHILIETSGLALPKPLLKAFDWPDIRSKITVDGVIALADAEAVAAGRFAPNVAAVDAQRLADDSIDHETPLSEVFEDQISCADIILLTKPDLAGPEGVARAREVIAAEAPRPLPVVEVAEGAVDVRVILGLGAAAEDDMDARPSHHDGHDDHEHDDFESIVVELPEQSDPAELVARIERLANELNILRVKGYAAVAGKPMRLLVQAVGARVRHQYDRPWQPGEERRSRMVVIAEHHDIDPAAINAILTGVSEPAE

SEQ ID NO: 8083 - DNA, 1227 bp, Francisella tularensis subsp. tularensis SCHU S4
  CDS (1)..(1227): transl_table=11
atgaaaaaactacctgttactgttttatcgggatttttaggagctggtaaaactactttattaaataatattcttaataatgctaatggccttagaatagctatgattgttaatgacatgaatgaaattaatattgatgctgagctaatcaaaaatcatgattcgcatatatcaaaaactgaagcaaagatggttgagcttagtaatggctgtatttgctgtactctgcgtgaagatttattagtagaagtagagcagttagcaaaatcacaaaaatatgattatttaattattgaaagtactggtatctcagagcctctacctgtggcaacaacttttgaatttagagatgaagatggtaaaagcttagcggatattgcatacattgatacaatggttacggtagtagatagtgtcaattttatgaatcattatagttcttcggaatatctaaaaaatactagcgaaagccttggagaagatgatgatagagcaatagttgatcttatggttgagcagatagagtttgctaatgtcataatattaaacaaaattaatgagtgctcgacagcagaaaaagagactgtcaaatctataatcaaaggactaaatgttgatgcagaaattatagaaacaaatttttctaaagttgatataaataaagttataaataccaagaaatttaatttagaagaagctgaaaatcatccgttatggagcaaagagctttataatttcaaagagcatgtgccggaaactgaagaatatggtattagatcttttgtttatcactcaataaatccttttgatccagttaagataatgaatttttttgataatgttgactggccaggagtagtgcgagcaaaaggctttttctggttagctacaagacctgattatgttggcgaggtttctcaagcaggtgctttgataagacatcaaggtatgggtatgtggtgggctagcatggacaaagatcagtggccagacactcccgaatttaaacaaatgttaaaagacagatggaatgatataagtggtgacagaaggcaagaaatagtatttattggtttaaaagatgagatgaaagatgagcaaattaaagcagccttggatcaatgcttaataaatgactattggaataatccagaaaaatatgcaaatttagtggatccatttcctgcttggtttgaatcagatgatgaagaggttaaaaatgagtaa

SEQ ID NO: 8084 - protein, 408 aa, Francisella tularensis subsp. tularensis SCHU S4
MKKLPVTVLSGFLGAGKTTLLNNILNNANGLRIAMIVNDMNEINIDAELIKNHDSHISKTEAKMVELSNGCICCTLREDLLVEVEQLAKSQKYDYLIIESTGISEPLPVATTFEFRDEDGKSLADIAYIDTMVTVVDSVNFMNHYSSSEYLKNTSESLGEDDDRAIVDLMVEQIEFANVIILNKINECSTAEKETVKSIIKGLNVDAEIIETNFSKVDINKVINTKKFNLEEAENHPLWSKELYNFKEHVPETEEYGIRSFVYHSINPFDPVKIMNFFDNVDWPGVVRAKGFFWLATRPDYVGEVSQAGALIRHQGMGMWWASMDKDQWPDTPEFKQMLKDRWNDISGDRRQEIVFIGLKDEMKDEQIKAALDQCLINDYWNNPEKYANLVDPFPAWFESDDEEVKNE

SEQ ID NO: 8085 - DNA, 1047 bp, Synechococcus elongatus PCC 6301
  CDS (1)..(1047): transl_table=11
atgcataagctgcccgtgacggtgatcaccggctttttaggagctggcaaaacgaccctgatccgcaatctcttgcttaataatcaaggtcgccggattgcggtcctcgtcaatgagttcggcgaagtcggcatcgatggtgagttgctgcgcagttgcggcgtttgcgatgaggatgaaactgcagacagtaatattctcgaactggcgaatggttgcctatgctgcacggttcaagaagaatttctgccaaccatgcaaacgctgttgcagcggcgggaacagattgactgcattgtgattgaaaccagcgggctggctttacctaaacctttagtccaagcctttcgtcggcccgaaattcggactggggcaaccgtcgatggggtggtcaccctcgtcgatgctgttgccgttgcagcgggtcaatttgcaacggatttggatgcccttgaagagcaacgccaagcagatgacagtcttgatcacgaaacgccaatcgaagagctatttgaggatcaattagcctgcgctgatctcgtgttactcagcaaaatcgactgcctctcacccgaagagagcgatcgcgttcgccgttggctgagtacgcaagtgcgatcgggtgtgccgattgtgccggtgaccaatggtcaacttgattcagatgttttgctgggctttaatgcagcagttgaagataatttagaacagcgacccagccatcacgatcacgaggaagagcatgatcacgatgatgcgatcgcggctgtccatttaaatctggatgcggaatggcagccagaagcattggctgagcgactgcaagccttacagcaatcccaaacgctctatcgtgtgaagggttttctagccgttccgggcaaatcaatgcgccttgtttttcagggtgtaggcccacgcttcgactggttctatgaccgtccttggcgatcgcccgaagaacgccgtagccagttagttgtgattggtgaagacctcaacgcagaggtcctacaatcagctctcaattctgttgctgttagctag

SEQ ID NO: 8086 - protein, 348 aa, Synechococcus elongatus PCC 6301
MHKLPVTVITGFLGAGKTTLIRNLLLNNQGRRIAVLVNEFGEVGIDGELLRSCGVCDEDETADSNILELANGCLCCTVQEEFLPTMQTLLQRREQIDCIVIETSGLALPKPLVQAFRRPEIRTGATVDGVVTLVDAVAVAAGQFATDLDALEEQRQADDSLDHETPIEELFEDQLACADLVLLSKIDCLSPEESDRVRRWLSTQVRSGVPIVPVTNGQLDSDVLLGFNAAVEDNLEQRPSHHDHEEEHDHDDAIAAVHLNLDAEWQPEALAERLQALQQSQTLYRVKGFLAVPGKSMRLVFQGVGPRFDWFYDRPWRSPEERRSQLVVIGEDLNAEVLQSALNSVAVS

SEQ ID NO: 8087 - DNA, 981 bp, Bacillus clausii KSM-K16
  CDS (1)..(981): transl_table=11
ttgccaaaacaacaaatggttccggtaacgattttaacgggctttctaggcgcagggaaaaccacattgctcaatcacttcttaaaagggatagatgaacaaaatgtggctgtcatcattaatgaatttagcgatacatcgattgatagccatttggtcgtgccaactaaggaagaaattatagaggtgaatagtggttgtatttgttgcaatgtacgggctgatttaatcaatcgattaagaaatttgaatgaacgagaagaatcccttgaccgtattgtcattgagacaacgggtatggcgaatccggcacccgtcattcaaacgtttttaatggataaggaaacggcccattcatttgaaatcgatcatgtgattacgatggttgacgccaaacatatttggcaacatttagcggaagaagagcctgggcaacaaatcgcttttgctgatgttcttttaataaataaggttgatttgattacggacgatgaaaaaaataaactgggacaacggctgactcatatgaacccacatgcgaagcaaatttatacaacatttgcacaggtagatagtcgagatgtcgttgggaaaaaatcctttgatttaaaaaatgtagtgaaaatagatccaactttattaaccgaaatgcatcaccaccaccataatgaactagtgacttcttttgtgtttcaggaagatcatccccttgatttagaaaaagtgaacaactggtttgcctatttagtccaatgtaaaggagaaacgttgtttcgttataaaggcgtcctttatataaagcaacttgagaaaagagttgtttttcaaggcgtacatatgttatttgcaagtacagagggagcgccgtgggcgaaagaggaaaagaggcaaagtgaaattgtttttattggcaagcatcttgacaaacaggaactagcgaaaggctttcactattgtcgtgcttcattttttgcgacttaa

SEQ ID NO: 8088 - protein, 326 aa, Bacillus clausii KSM-K16
MPKQQMVPVTILTGFLGAGKTTLLNHFLKGIDEQNVAVIINEFSDTSIDSHLVVPTKEEIIEVNSGCICCNVRADLINRLRNLNEREESLDRIVIETTGMANPAPVIQTFLMDKETAHSFEIDHVITMVDAKHIWQHLAEEEPGQQIAFADVLLINKVDLITDDEKNKLGQRLTHMNPHAKQIYTTFAQVDSRDVVGKKSFDLKNVVKIDPTLLTEMHHHHHNELVTSFVFQEDHPLDLEKVNNWFAYLVQCKGETLFRYKGVLYIKQLEKRVVFQGVHMLFASTEGAPWAKEEKRQSEIVFIGKHLDKQELAKGFHYCRASFFAT

SEQ ID NO: 8089 - DNA, 1203 bp, Staphylococcus aureus subsp. aureus COL
  CDS (1)..(1203): transl_table=11
atggctaaaattccagttacggtattaagtggttatttaggctcggggaagacaacgttgttaaatcatattttacaaaatcgagaaggtcgacgtatcgcggtaattgtaaatgatatgagtgaagtaaatatcgataaagatcttgtcgcagatggtgggggactatcgcgtacagatgaaaaattagtcgaactttctaatggttgtatctgttgtacacttagagacgatttattaaaagaagttgagcgtttagtgaaaaaaggtggcatcgatcaaattgttattgagtcaacagggatttcagagccagtacctgttgcacaaactttctcatatattgatgatgaacttggcattgatcttacagcgatttgccgtttagatacaatggttacagttgtggatgctaaccgcttcgtacatgacatcaactcagaagatttattgatggatcgtgatcaaagcgttgacgaaacagatgagcgttcgattgctgatttattaattgaccaagttgaattttgtgatgtattgattattaataaaattgatttaattagtgaagaagaactagcgaagttagaaaaaatgttaagcgcattgcaaccgactgctaaaattattaagacaacaaattctgaagtagatttaaaagaagtcttgaatacgcagcgttttgattttgaaaaagcgagcgagtcagcaggatggatcaaagaacttgagtctggtgggcatgcatcgcatacacctgaaacagaagaatatggtatatcatcgtttgtatataaacgtcgtctacctttccatgctaaaaggttcaatgattggttagaaagcatgccaaataatgtcgttcgatcaaaaggtatcgtatggctagcacaatacaatcacgtagcatgtttattatctcaagcagggtcatcttgcaatattcatccagttacatattgggtggctagtatgtctgaagcgcaacaaacacaaatattagcagaacgtcaagatgtcgcagctgaatgggatccagaatatggcgatcgtcatacacaatttgtcattattggtacagaattagatgaagaaaaattaacaaaagaactcgacgcatgcttagtcaatgcgcaagaaattgatgcagattggcaacaatttgaagatccatatcaatggcaaattagaccagcacgataa

SEQ ID NO: 8090 - protein, 400 aa, Staphylococcus aureus subsp. aureus COL
MAKIPVTVLSGYLGSGKTTLLNHILQNREGRRIAVIVNDMSEVNIDKDLVADGGGLSRTDEKLVELSNGCICCTLRDDLLKEVERLVKKGGIDQIVIESTGISEPVPVAQTFSYIDDELGIDLTAICRLDTMVTVVDANRFVHDINSEDLLMDRDQSVDETDERSIADLLIDQVEFCDVLIINKIDLISEEELAKLEKMLSALQPTAKIIKTTNSEVDLKEVLNTQRFDFEKASESAGWIKELESGGHASHTPETEEYGISSFVYKRRLPFHAKRFNDWLESMPNNVVRSKGIVWLAQYNHVACLLSQAGSSCNIHPVTYWVASMSEAQQTQILAERQDVAAEWDPEYGDRHTQFVIIGTELDEEKLTKELDACLVNAQEIDADWQQFEDPYQWQIRPAR

SEQ ID NO: 8091 - DNA, 927 bp, Staphylococcus aureus subsp. aureus COL
  CDS (1)..(927): transl_table=11
atgaaaaataataaagatgaaaaaataagaatatccataattaacggatttttgggtagtggtaaaaccacgttactgacacattatattagtgaattattaaaaaatgatgagaaaattaaaatcatcatgaatgaattcggtacttttgatattgatagcaatagtatttcaaatgaaattgaagtccattcattgattaatggttgtgtttgttgcgatcttaaacaagaacttgtctatgaactaaaagccattgctttaaaaggggacgttaatcatgtcatcatagaagcgacaggcattgcgcatcctttggaattactagttgcatgtcaagatccgcaaatcgttaatttctttgaaaagccgattatttatggtgtattagatgcgactcgatttttagaacgtcatcaatataccgaaaatacagtttcgctgatggaagatcagttgaaactaagtgacatgattattattaataaaattgatcttataactgatgacagtcttgagaaaattgataagcaattaggtatgatttgtgcaagtattccaacttataaaacaacctatggaaaagtttcgttggaagaattggacttaactgttaaagacagagagatatcgtctcatcatcaccatcatcatgggattaaaagtatgacttacacgtttacaggtccgattgatcgtcatttgttttatcaatttataatgaaattaccggaatctgttctacgtttgaaaggttatgtgtcatttagagatcaaccaaatgcaatttatgaatttcaatatgcatatggtttaccagactatggaataattggcatgcaattaccattaacgattgttattattggtgaaactttagatacaaatcacatacgtaatcaattggatatgctacaatttacgtaa

SEQ ID NO: 8092 - protein, 308 aa, Staphylococcus aureus subsp. aureus COL
MKNNKDEKIRISIINGFLGSGKTTLLTHYISELLKNDEKIKIIMNEFGTFDIDSNSISNEIEVHSLINGCVCCDLKQELVYELKAIALKGDVNHVIIEATGIAHPLELLVACQDPQIVNFFEKPIIYGVLDATRFLERHQYTENTVSLMEDQLKLSDMIIINKIDLITDDSLEKIDKQLGMICASIPTYKTTYGKVSLEELDLTVKDREISSHHHHHHGIKSMTYTFTGPIDRHLFYQFIMKLPESVLRLKGYVSFRDQPNAIYEFQYAYGLPDYGIIGMQLPLTIVIIGETLDTNHIRNQLDMLQFT

SEQ ID NO: 8093 - DNA, 1203 bp, Staphylococcus epidermidis RP62A
  CDS (1)..(1203): transl_table=11
atggcgaaaatacctgtaactgtattaagtggatatttagggtcgggcaaaacgacattgcttaatcatatattaaaaaatagagaagggcgacgcattgctgtcatagtcaatgatatgagtgaagttaatattgataaggatttagtagcacaaggtggcggcttatctagaacagatgagaaattagtagaactttctaatggatgcatatgttgtactttaagagacgatttgttacgagaagtcgagcgcttagttcacaaagggggtatcgatcaaattgtaattgaatcaactgggatatctgagcctgtaccagtagctcaaacgttctcatacatagatgaagaattaggtattgatttaacctctatatgtcgattagatacaatggtgacggttgtagatgcgaatcgctttgttaatgatattcgtagtgaagatttattggcagaccgtgatgaaagtgttgatgatgaagatgagcgtactattgctgacttactcattgatcaagtagaattttgtgatgtgatgattatcaataaaatcgatttgattagcgacgaagctttagaaaaattagaaaatgtattacgtgcattgcaacccgaagctaaaattattaaaacagtaaatgctaaagtggaattatcagatgtacttaatacgcaattatttgattttgagaaggcaagtgaatcagctggatggatcaaagaattaacagctggaggacatgcgacacatacgccggaaacagaagagtatgggattacatcatttgcttatactagacgattaccatttcatgcaaaaagatttcatcaatggctagaacaaatgccagaaaatattgtaagaacaaaagggattgtatggttagcgcagtataatgatgtagcgtgtttgttatcacaggctggttcatcttgtaatattcaccccgttacatactgggtggcaacaatgagtgaaagtcaacagcaagctattttggaggcgcgtcaagatgtagtagaagattgggatatcgaatatggagatcgtcaaacgcaatttgtaattattggtacggatttagatcaagaaaaaatttcccgggaattagatgcatgcttaattcatagtagtgagattgatgaagattggcgattactagatagtccgtatcaatggacttatgatcgacgaatgtaa

SEQ ID NO: 8094 - protein, 400 aa, Staphylococcus epidermidis RP62A
MAKIPVTVLSGYLGSGKTTLLNHILKNREGRRIAVIVNDMSEVNIDKDLVAQGGGLSRTDEKLVELSNGCICCTLRDDLLREVERLVHKGGIDQIVIESTGISEPVPVAQTFSYIDEELGIDLTSICRLDTMVTVVDANRFVNDIRSEDLLADRDESVDDEDERTIADLLIDQVEFCDVMIINKIDLISDEALEKLENVLRALQPEAKIIKTVNAKVELSDVLNTQLFDFEKASESAGWIKELTAGGHATHTPETEEYGITSFAYTRRLPFHAKRFHQWLEQMPENIVRTKGIVWLAQYNDVACLLSQAGSSCNIHPVTYWVATMSESQQQAILEARQDVVEDWDIEYGDRQTQFVIIGTDLDQEKISRELDACLIHSSEIDEDWRLLDSPYQWTYDRRM

SEQ ID NO: 8095 - DNA, 927 bp, Staphylococcus epidermidis RP62A
  CDS (1)..(927): transl_table=11
atgaaaaataataaaaatgaaaagttgaaaatcacaatcgttagcggtttcttaggcagtggtaaaactacgttcctgacacattatattaatgaattattaaaaattgatgagaaaataacagtaattatgaacgaatttggatcatttgatgtagatggtaaccatttgagtgaattagtcaaagtgtatccattgttgaacggttgtgtttgttgtgatatgaaatcagatttagttcaacaaattgagatgctcagtcacaaccatgaaacggaccatattataatagaagcaactggtatcgcgcatcctattgaattgattatggcgtgtcaagatcctcgcatagttcagtttgttgaacgtccccacgttgttagtattgttgatgcacttcgctttttacaaagacaacagtatactgactccacaaagcgtctcatggaagaacaactcgaggtaagcgatgtgctcgtcgttaataaattagatttaatatctgttgaagacagagatgctttaaagaaccaacttaacgaagtaaacaaatatagttcaaaaatatatactacttatggacaagttaatatcgaggagttgtcacaatttcgtgatcaattagtaatgacacacacacattctcatcaccatggtataaatagtatgcaatacacatttacaacagctattgaccgacaattattttaccaatttattttgcgtatgcctgataatgttttaagattaaagggatatgtacaatttaaagatgaacccaatgtgacatatgagtttcaatattcatttggtatgccggattatgaagttattaatggggattatccgttaacaatagtattgattggtgaacaacttgatgttaacagactaaaaaataaactcgatgttttgcaattctcataa

SEQ ID NO: 8096 - protein, 308 aa, Staphylococcus epidermidis RP62A
MKNNKNEKLKITIVSGFLGSGKTTFLTHYINELLKIDEKITVIMNEFGSFDVDGNHLSELVKVYPLLNGCVCCDMKSDLVQQIEMLSHNHETDHIIIEATGIAHPIELIMACQDPRIVQFVERPHVVSIVDALRFLQRQQYTDSTKRLMEEQLEVSDVLVVNKLDLISVEDRDALKNQLNEVNKYSSKIYTTYGQVNIEELSQFRDQLVMTHTHSHHHGINSMQYTFTTAIDRQLFYQFILRMPDNVLRLKGYVQFKDEPNVTYEFQYSFGMPDYEVINGDYPLTIVLIGEQLDVNRLKNKLDVLQFS

SEQ ID NO: 8097 - DNA, 993 bp, Gluconobacter oxydans 621H
  CDS (1)..(993): transl_table=11
gtgagccgggaagctggcctgggagaggctgcggccgttccggtgcacgtggtgggcggttttcttggtgccgggaaaaccacgctgctcaaccgactgctcagggcgcagcagcatcggcgtcttgccattctcgtcaatgatttcggcgcgattgatatcgacgggttgctggtggagcggcgggatgaggacgtgctggcgctgaggaatggctgcatctgctgttccctgcaggctgatctgttctctacgctgagaatggttctgtcccgtcggccgttgcctgaggccatttttatcgaatgcagcggggtttcgaagcttcaggaaatgcgcagggcgttggcagatcccattctctggcagtatgcggcccttgaaggggtgatctgtgtcgtgaacgctgccgatgtggtcgcgcaggccagggtgactgaagatcctttgtggaaagagcagatcctgtcttcggacatgatcgttctttcccatacggacgagcttggaaaagctggtgtcagggatgcagaagaccaacttcgggagatcgggcgcgggataccggtcctgcctttttcaggcagcctgctgatgcatgaggggctttttcgtcccctggatcggaaaacggaaaaatccctttttcggtctgaaggggagagcattgacgatgatttcgtcagcctggagtggcgacgggagtttccgctggacctgacgggatttcgcgcggtgatcgaacgccatgctccggtgctgcttcgggcaaaaggcatcctctatctcgcgactgctccaaagcgtgcattgctgcttcagatgacagggtcccggattaccatcgggcgggcacccgagaaggcccggtccgatcccgacacccgacttgtgttcattggtcggaaagggatgtttgatccgcaggcgctgaaggatgatcttgacgctatgagagagagggcctctcgaaatgcgggactaaatccttag

SEQ ID NO: 8098 - protein, 330 aa, Gluconobacter oxydans 621H
MSREAGLGEAAAVPVHVVGGFLGAGKTTLLNRLLRAQQHRRLAILVNDFGAIDIDGLLVERRDEDVLALRNGCICCSLQADLFSTLRMVLSRRPLPEAIFIECSGVSKLQEMRRALADPILWQYAALEGVICVVNAADVVAQARVTEDPLWKEQILSSDMIVLSHTDELGKAGVRDAEDQLREIGRGIPVLPFSGSLLMHEGLFRPLDRKTEKSLFRSEGESIDDDFVSLEWRREFPLDLTGFRAVIERHAPVLLRAKGILYLATAPKRALLLQMTGSRITIGRAPEKARSDPDTRLVFIGRKGMFDPQALKDDLDAMRERASRNAGLNP

SEQ ID NO: 8099 - DNA, 1011 bp, Gluconobacter oxydans 621H
  CDS (1)..(1011): transl_table=11
atgtccagcacccctgataccacccccgagactgctgctgcgccggcacggaccggaaccgttcccgtgacggtcctcaccggctttctcggcgccggcaagacgacgcttctcaatcatatcctgacagccgagcatggccgcaaatatgcggtggtcgtgaatgagttcggcgaactcgggatcgacaatgatctcgtggtagatgccgacgaggaagtgttcgagatgaacaacggctgcatctgctgcacggtgcgcggggatctgatccgcattctgggcagtttgctgcgtcggcggaaccgctttgacggtatcattgtcgagacgaccggactggccgatccggctccggtcgcgcagacgttcttcgtggacgagaatctgcgggagaaagcgcgtctggacgcggtcgtgacggttgtggatgcgttcaacgtcatggaaacgctggatgaaagccccgaagccgtaaaccagatcgcgtttgcggatgtgatcgtgctcaacaaggtggatcttgcggatgaagaacgccgcaaggagatcgtggcccgtctgcgcaagatcaatgctgtggcgcagatccatgaggcgcagcatggcggcgtgaatctgacggatattctggaccgtggcggcttcgatctgacgcgtgcgctcaagacgatgccggactttctggagaacgagcatcattcccatgaggaaggcatcaccagcatttccctgagtatcaaggacctgatcgaccagcgtcgttttcaggcctggatcggggcgatccttcaggagcagggcgcggacatcctgcgggccaagggcatcctgcatttcaagggcgagaaggaccgctttgcgttccaggccgtgcacatgatggcagatggcgacttcatcggcccgttccgcgaaggcgagagccgggagtcccgtctggtattcatcggccgcaatctcaaccgtccgcagcttcgtcgcggatttgaaagctgcattgcggaatga

SEQ ID NO: 8100 - protein, 336 aa, Gluconobacter oxydans 621H
MSSTPDTTPETAAAPARTGTVPVTVLTGFLGAGKTTLLNHILTAEHGRKYAVVVNEFGELGIDNDLVVDADEEVFEMNNGCICCTVRGDLIRILGSLLRRRNRFDGIIVETTGLADPAPVAQTFFVDENLREKARLDAVVTVVDAFNVMETLDESPEAVNQIAFADVIVLNKVDLADEERRKEIVARLRKINAVAQIHEAQHGGVNLTDILDRGGFDLTRALKTMPDFLENEHHSHEEGITSISLSIKDLIDQRRFQAWIGAILQEQGADILRAKGILHFKGEKDRFAFQAVHMMADGDFIGPFREGESRESRLVFIGRNLNRPQLRRGFESCIAE

SEQ ID NO: 8101 - DNA, 1203 bp, Gluconobacter oxydans 621H
  CDS (1)..(1203): transl_table=11
atgtcggatacccgattgcccgtgactgtcctttccggcttcctgggggctggcaagacaacgcttctcaatcacgtcctgcataatcgcgaaggactgagagtggccgtcatcgtcaatgacatgagcgatgtgaacatcgacgcccagctcatccgtaacggagggagcaacctctcgcggacggaagaaaaactggtggaaatgactaatggctgcatctgctgcacgctgcgggatgatctgctgacagaagttgcgcggctggcggcagaaggccggtttgattacctgctgattgaatcaaccggcatcgccgagcctctcccggtcgcagccacctttgaattccgcgataaggaaggccgcagtctgagcgatatcgcgcgccttgatacgatggtcacagttgtggatgccgtgaacctgctgcgggactatggttcgaccgattttctgcgggaccggggtgaagttgcgggagaagacgacgaacgggcgcttgtggatctgttcgtcgaccagatcgagtttgcggatgtcatcattctcaacaagattgatacggccacgcccgagcaggctgaggccgcacggctgatcatccgctccctgaacgccgatgcggttctgatcgaaacgagccagagccgggtggcgctggatcagatcctgaatacgggacgttttgattttgatcgcgcgcatcagcatcccacctggttccaggaactgtacggacatgcagaacaccgccctgaaaccgaagaatatggcatcgacagttttgtctatcgtgcccgccgccccttcaatccggaggccttcgcggacttcatcgcgcaatcctggcatggcgttgtgcgggtcaaaggctatttctggctcgcaacccggccggactgggtcggggatctgagtattgccggcgcactggccccccatcaggctgccggacgctggtgggccagtgtgccgcatcagaactggccggacgatgaggcttggaaagctacgctcgcgggatactgggacgatgtttatggcgatcgcaggcaggaactcgtctttatcggcgccggcatggatgaaaccgcgatccgggcggcactggacaactgtcttgtgccgccctcacaggatgacgtcttcatgccatggcattacgaccatcttgcggatcccttcccgcaatgggcctaa

SEQ ID NO: 8102 - protein, 400 aa, Gluconobacter oxydans 621H
MSDTRLPVTVLSGFLGAGKTTLLNHVLHNREGLRVAVIVNDMSDVNIDAQLIRNGGSNLSRTEEKLVEMTNGCICCTLRDDLLTEVARLAAEGRFDYLLIESTGIAEPLPVAATFEFRDKEGRSLSDIARLDTMVTVVDAVNLLRDYGSTDFLRDRGEVAGEDDERALVDLFVDQIEFADVIILNKIDTATPEQAEAARLIIRSLNADAVLIETSQSRVALDQILNTGRFDFDRAHQHPTWFQELYGHAEHRPETEEYGIDSFVYRARRPFNPEAFADFIAQSWHGVVRVKGYFWLATRPDWVGDLSIAGALAPHQAAGRWWASVPHQNWPDDEAWKATLAGYWDDVYGDRRQELVFIGAGMDETAIRAALDNCLVPPSQDDVFMPWHYDHLADPFPQWA

SEQ ID NO: 8103 - DNA, 1326 bp, Xanthomonas oryzae pv. oryzae KACC10331
  CDS (1)..(1326): transl_table=11
atgtccctgtcccccaagcgcgattcacgcctccccgtcaccgtgttgtccggctttctgggcgcgggcaagaccaccttgctcaatcgcatcctgcataaccgcgacggtctgcgtgtggcggtgatcgtcaacgacatgagcgaggtcaacatcgacgcgcagctggtacgcgagggcggcgcggcgctgcggcgcaccgaagagacgctggtggaattcagtaacggctgcatctgctgcacgctgcgcgacgatctgctgcaggaagtgcggcggctggccgagcagggtcgctacgactatctgctgatcgaatcgaccggtatcgccgagccgatgccggtcgccgccaccttcgccgtgcgcgatgccgacggtttcagcctgtcggacattgcccggctcgacaccatggtgacggtggtggacggcagccgttttctgcaggacttcggctcggccgccacgctggccgagctcggccagcaagccggcccggacgacacgcgcgggctggtgcagttgcttggcgaacaggtggaatttgccgatgtgctggtgatcagcaaatgcgaccgcatcgatgcgcagcagctgcagcgcctgcgcgcggtgctgcgtgcgctcaaccgcgaggcggcgattgtggatgcggcgcatggcgaggtgccgctgcagcagttgctcgacaccgggcgtttcgatttcacccgtgcgcagctggcgccgggctggatgcaggaactgcgcggccagcacacgccggaaaccgaggaatacggcatcagcagcttcgtgtaccgcgcacgtcggccatttcatccgcagcgcttcgcgcacatggtgcagagcggcctgccgcaggtgattcgcagcaaggggttcttctggttggccagtcgcatggattgggtgggcgaactgtccagcgtgggcggcgccacccagaccaatgcagccggtttctggttcgctgcgcgccaccgcgtggatgcgcaatcgatcggccagccgctgcagaccagtatgacgcccttgccctacaccgacctcggctggcagcggcaacagacgcactgctggaccgcgccgctgccgcaaccccatgaggtgggcgatgccaacgaatacgccgcgatgcagcggctgtggcatccgctctggggcgaccgccgccaggaactggcagtgatcggcgtggagatggacgcatcgcgcacgcgcgctgcgctggatgcctgcctgctcagcgatcaggaactgcgtcaggggccggcgcaatggcagctgctggacgacccgtttccgcattgggcgcgttga

SEQ ID NO: 8104 - protein, 441 aa, Xanthomonas oryzae pv. oryzae KACC10331
MSLSPKRDSRLPVTVLSGFLGAGKTTLLNRILHNRDGLRVAVIVNDMSEVNIDAQLVREGGAALRRTEETLVEFSNGCICCTLRDDLLQEVRRLAEQGRYDYLLIESTGIAEPMPVAATFAVRDADGFSLSDIARLDTMVTVVDGSRFLQDFGSAATLAELGQQAGPDDTRGLVQLLGEQVEFADVLVISKCDRIDAQQLQRLRAVLRALNREAAIVDAAHGEVPLQQLLDTGRFDFTRAQLAPGWMQELRGQHTPETEEYGISSFVYRARRPFHPQRFAHMVQSGLPQVIRSKGFFWLASRMDWVGELSSVGGATQTNAAGFWFAARHRVDAQSIGQPLQTSMTPLPYTDLGWQRQQTHCWTAPLPQPHEVGDANEYAAMQRLWHPLWGDRRQELAVIGVEMDASRTRAALDACLLSDQELRQGPAQWQLLDDPFPHWAR

SEQ ID NO: 8105 - DNA, 438 bp, Vibrio fischeri ES114
  CDS (1)..(438): transl_table=11
atgagctctaataaacaccctatcatcggcgttcctaccaatattattactggctttctcggcgtaggaaaaacctcgactattctgaaccttatggcaaataaaccaaaagacgaacgttgggcgatcttagttaatgagtttggtgaaatcggtatcgatggcagtctaatgcaagggcaacatacgaccaatccacaaggagcagaacagcaaatctttgtgcgagaagttcccggtggttgtatgtgctgtgcagcgggtttacccatgcaaattgcgcttaatcaactactatcagaagcgaaaccagaccgactattaatagaaccaacagggctaggccacccaaaagaagtactacaaatactctcttcagagcactatcgtcaggtgttaacgttgcaaaaaaatatcacctttagtcgatgctcgtaa

SEQ ID NO: 8106 - protein, 145 aa, Vibrio fischeri ES114
MSSNKHPIIGVPTNIITGFLGVGKTSTILNLMANKPKDERWAILVNEFGEIGIDGSLMQGQHTTNPQGAEQQIFVREVPGGCMCCAAGLPMQIALNQLLSEAKPDRLLIEPTGLGHPKEVLQILSSEHYRQVLTLQKNITFSRCS

SEQ ID NO: 8107 - DNA, 969 bp, Vibrio fischeri ES114
  CDS (1)..(969): transl_table=11
atgaaaaaaataccaacgaatattattacgggttttctaggtgtaggaaaaaccaccaccatcttgcaattactaaaaaacaaaccagagaatgaatcttgggctgtattagtaaatgaatttggtgaagttggcattgatggggcttttcttgctgaaggcggtgccatggtgaaagaagttcctggtggctgtatgtgctgtactgctggccttcctatgtctgttggtattaacgcgttactgagacaaaaaccagaccgtttaattattgaaccaacagggttagggcaccctaaaaagatcattgctattttacaatcagagaactatgaaaagtatatcgatttgaaagcaacgattggccttgttgacccacgaaacctatctgatgaaaagtatgtatctaatcaaaactttaatgatcaattgggtatttctgatgtcgttgttgcaactaagatggacatggtctcagattacgatgagtgcttattcgactcatggacaaaagagctatcaacgcagcctaaaacgacaaagataaatcatggtgatctaccacaatcttggttagatgaagatcgtactattgagttaacgattgaagaacatcatcatcaccatgctgaacaagatattgtcgaaatggcattagaaccaggacaaaaattttgtcgtaaagagaataaaggccaaggctatgttagttgcgggtggttttttggagctgagtccgtatttgattttgaagagttgttttcaatgctatctgatttgaatgcagaacgaattaaagcggtaatgaatactgataaaggctgttatgcatttaatgtggctaatcgtgttgtctcagttaatcaattaagtattgaaggtatggagtcgaaacttgaagttatcgatactcaattgcttccatgggatcagttagaaacgattttattaagtttgatcattgaataa

SEQ ID NO: 8108 - protein, 322 aa, Vibrio fischeri ES114
MKKIPTNIITGFLGVGKTTTILQLLKNKPENESWAVLVNEFGEVGIDGAFLAEGGAMVKEVPGGCMCCTAGLPMSVGINALLRQKPDRLIIEPTGLGHPKKIIAILQSENYEKYIDLKATIGLVDPRNLSDEKYVSNQNFNDQLGISDVVVATKMDMVSDYDECLFDSWTKELSTQPKTTKINHGDLPQSWLDEDRTIELTIEEHHHHHAEQDIVEMALEPGQKFCRKENKGQGYVSCGWFFGAESVFDFEELFSMLSDLNAERIKAVMNTDKGCYAFNVANRVVSVNQLSIEGMESKLEVIDTQLLPWDQLETILLSLIIE

SEQ ID NO: 8109 - DNA, 927 bp, Neisseria gonorrhoeae FA 1090
  CDS (1)..(927): transl_table=11
atgtcagaagtgaaaaaaaccaaagtccacctgatttcaggttttctgggaacaggcaaaaccaccgcgctcaaaagcctgatggcgcaaaaagacccgaacgaaaaatgggtcatcatcgtcaacgagttcggcgaaatcggcattgacggcgcggtattgagcgacaacggcatccctgtggcagaaatcgccggcggctgtttatgctgcaccgccggcccgcaaatgggcgtaaccgtgcagaaaatgctgcgcgacgccaaacccgaccgcctgatgattgaggcaagcggactggcgcacgccgccagcgtcatcgacgaattgaaagccaaacctctggacagtcttttggaaatcggcgccgtctttaccgtcgtcgatccgcgccagttcatcaatcccgattacgcgcaacaggcgttgtataaagaccaaatcggcatttgcgacgtattggccgccagcaaaaccgatttatgcacccccgaacagcttgccgaatttcatgacaaagcggcaaaactgttcccacccaaagctaaagtggtcgaagtccaaaacgcacaactcgatatccaatggctcgatattcccgtagttgaaaaatcacgctaccgcctcaaagccctgccggacaacaccatgggcttccagtcgcaaggtttcacattccccgccggacgcgatttcaacggcgaaaaattgaccaacttcttcaatgatttgcccaaaatgaccgaaggactcgtccgcgccaaaggcgtgttccaagtattgggaacgtgggtgtggctcaactgggtggacgggcagtggggcgcgaaccaagtgtcttggcggcgcgattcgcgtttcgagctgattgccaaatcgtttgacgcggatttaatcgaacaaaaacttaaagacgcattggaatag

SEQ ID NO: 8110 - protein, 308 aa, Neisseria gonorrhoeae FA 1090
MSEVKKTKVHLISGFLGTGKTTALKSLMAQKDPNEKWVIIVNEFGEIGIDGAVLSDNGIPVAEIAGGCLCCTAGPQMGVTVQKMLRDAKPDRLMIEASGLAHAASVIDELKAKPLDSLLEIGAVFTVVDPRQFINPDYAQQALYKDQIGICDVLAASKTDLCTPEQLAEFHDKAAKLFPPKAKVVEVQNAQLDIQWLDIPVVEKSRYRLKALPDNTMGFQSQGFTFPAGRDFNGEKLTNFFNDLPKMTEGLVRAKGVFQVLGTWVWLNWVDGQWGANQVSWRRDSRFELIAKSFDADLIEQKLKDALE

SEQ ID NO: 8111 - DNA, 957 bp, Salmonella enterica subsp. enterica serovar Choleraesuis str
  CDS (1)..(957): transl_table=11
atgaccccgattgcagttaccctacttaccggttttcttggtgccggcaaaaccaccctactacgccatatcctcaacgaacaacatggttttaaaattgctgttatcgaaaacgaatttggcgaagtctccgttgacgatcaactgattggcgatcgcgccacacagatcaaaaccctgactaacggctgcatctgctgtacccgctccaacgagctggaagatgcgctattagacctgctcgacagccgcgaccgcggcgatattgctttcgaccgcctggtgattgaatgcaccggcatggctgaccccggcccgattattcagacctttttctcccatgacgtattatgcgaacgctacctgttagacggcgtgattgcgctggtcgacgcggtgcacgctaacgagcagatgaaccagttcaccatcgcccagtcgcagataggctacgccgaccgcattctgttgaccaaaaccgacgtggcaggcgacagcgagaaactgcgcgaacggctggcgcgtatcaatgcccgcgccccggtttacaccgtggtacacggcgatattgacctgagtcagttgtttaataccagcggctttatgctggaagagaacgtgctggcaagccaaccgcgtttccactttattgccgataaacagaacgatgtgtcgtcaattgtggtggaactggattacccggtggatatcagcgaggtgtcgcgggtgatggaaaacctgctgctggaatcagcggataaactgctgcgttacaaagggatgctgtggatcgacggcgaacccaaccgtctgctgttccagggcgtgcagcgtctctacagcgccgactgggacagaccgtggggcgacgaaacgccgcacagcacgctggtatttatcgggatccagttaccggaagacgagattagaacggcatttgcggggttaaggaagtaa

SEQ ID NO: 8112 - protein, 318 aa, Salmonella enterica subsp. enterica serovar Choleraesuis str
MTPIAVTLLTGFLGAGKTTLLRHILNEQHGFKIAVIENEFGEVSVDDQLIGDRATQIKTLTNGCICCTRSNELEDALLDLLDSRDRGDIAFDRLVIECTGMADPGPIIQTFFSHDVLCERYLLDGVIALVDAVHANEQMNQFTIAQSQIGYADRILLTKTDVAGDSEKLRERLARINARAPVYTVVHGDIDLSQLFNTSGFMLEENVLASQPRFHFIADKQNDVSSIVVELDYPVDISEVSRVMENLLLESADKLLRYKGMLWIDGEPNRLLFQGVQRLYSADWDRPWGDETPHSTLVFIGIQLPEDEIRTAFAGLRK

SEQ ID NO: 8113 - DNA, 1050 bp, Brucella abortus biovar 1 str. 9-941
  CDS (1)..(1050): transl_table=11
atgcagggacagaaaattccggcaacggtcatcacgggttttctcggatcgggcaagacaaccatgatccgcaacttgctggaaaatgccaatggcaagcgcatcgcactgattatcaacgagttcggcgatctcggcgtcgatggcggcattctgaaaggctgcgggatcgaaacctgccgggaggaagatgtcatcgagctcaataatggctgcatctgctgcaccgtggccgatgatttcattccgaccatgacaaagcttctggaccgggaagaccggcccgaccatatcgtgatcgaaacctccggtcttgccttgccacagccgctggtggccgccttcaactggccggagatcaagacgcaggtgacggttgatggcgtggtgacggtgatcgatgccgccgccatggcggaaggccgttttgccgacgaccatgacaaggtggatgcgcagcgcgcagccgatgaatctcttgaccatgaaagccccttggaggaactttttgaggatcagattcatgccgccgacctcattgttctcaacaaggccgacctgatcgatgctgcgaaactggatagcgtgaaggcggatgtggcggagcgttcgtcacgccgggtgaatatggtgcctgcaagcttcggcaagcttggtgcggatgttctgctggggcttggcgttgggacggaagacgatatcgtcaaccgtcgctcgcatcatgaagcccatcatggagacggccacgagcatgatcatgacgagtttgagagttttgtggtggaggccggttcggttgccgatccgaaggcttttgcggaaaagctgaaggctgtgattgccgaacacgatattcttcgcctgaagggttttgtggatgtgccgggcaagccgatgcgccttgtggtgcaggcggtggggccgcgtatcgaacattatttcgaccggccatggggcaaggatgaaacacgctcgacccggctggtggtgattggcctgcacgatattgacgaagcagccatcgcccaggccgtgaaagatgccgcctga

SEQ ID NO: 8114 - protein, 349 aa, Brucella abortus biovar 1 str. 9-941
MQGQKIPATVITGFLGSGKTTMIRNLLENANGKRIALIINEFGDLGVDGGILKGCGIETCREEDVIELNNGCICCTVADDFIPTMTKLLDREDRPDHIVIETSGLALPQPLVAAFNWPEIKTQVTVDGVVTVIDAAAMAEGRFADDHDKVDAQRAADESLDHESPLEELFEDQIHAADLIVLNKADLIDAAKLDSVKADVAERSSRRVNMVPASFGKLGADVLLGLGVGTEDDIVNRRSHHEAHHGDGHEHDHDEFESFVVEAGSVADPKAFAEKLKAVIAEHDILRLKGFVDVPGKPMRLVVQAVGPRIEHYFDRPWGKDETRSTRLVVIGLHDIDEAAIAQAVKDAA

SEQ ID NO: 8115 - DNA, 1173 bp, Brucella abortus biovar 1 str. 9-941
  CDS (1)..(1173): transl_table=11
atgcctgatcccattcccgtttccgtgctgaccggctttcttggctccggcaagacgacgctgctcaaccggcttttgaaagatccggcgctcagcgatacagcagtcattatcaacgagttcggcgaggtgagcattgaccatctgctggtcgagcaggcgagcgagggcgtgatcgagctggctgacgggtgtctgtgctgcacagtgcgcggtgaactggtcgatacgctggccgatctcatcgaccggttgcagaccggccgcatcaaggcgctgaagcgcgtcatcatcgaaaccacggggcttgccgatccggccccggtgctgcattcgatcatgggtcatcctcttctcacgcaggttttccggcttgatggcgtgctggctaccgtggatgcggtgaacggcatggcaacgctcgacaatcatgaggaagccgtcaaacaggcagccatggccgaccgcatcatcctcaccaagaccgatctgccggaagcacaggctggcttgccggcattgaaggcacggttgcgcacgcttaaccccggagccgatattctggaagtgggggaagagcgcacaggctatgccgcgctttttgaatgcgggctttataacccgcagacgaaatcggcggatgtgcggcgctggcttaaggccgaagcctatgaggacgagcatcatggccatggccatgtgtgcgggccggattgcggtcacgaccatcatcaccacgatcaccatcacgatcatcataacgatcagggctatgcgcatcatcatcatcatgacgatgcgatccgttcgttttcactgcgccatgatgcgccgatcccggtttcgaccttcgagatgtttctcgatcttctgcgttcgacccatggtgaaaagctcttgcgcatgaagggtatcgtgcagattgccgaagacccggaccgcccggtcgtcatccatggtgtgcagaagattttccatccgcccgcgcgcctgccgcaatggccgcaaggcaagcgcgaaacgcttctggtcctgattgtgaaggacttgccggaggcctatgtgcgggaacttttcgatgcctttctgggccggcccggcctcgacaggcccgaccgcgcagccatgactgaaaatccgctggccattccggggttctcaccccgccggtaa

SEQ ID NO: 8116 - protein, 390 aa, Brucella abortus biovar 1 str. 9-941
MPDPIPVSVLTGFLGSGKTTLLNRLLKDPALSDTAVIINEFGEVSIDHLLVEQASEGVIELADGCLCCTVRGELVDTLADLIDRLQTGRIKALKRVIIETTGLADPAPVLHSIMGHPLLTQVFRLDGVLATVDAVNGMATLDNHEEAVKQAAMADRIILTKTDLPEAQAGLPALKARLRTLNPGADILEVGEERTGYAALFECGLYNPQTKSADVRRWLKAEAYEDEHHGHGHVCGPDCGHDHHHHDHHHDHHNDQGYAHHHHHDDAIRSFSLRHDAPIPVSTFEMFLDLLRSTHGEKLLRMKGIVQIAEDPDRPVVIHGVQKIFHPPARLPQWPQGKRETLLVLIVKDLPEAYVRELFDAFLGRPGLDRPDRAAMTENPLAIPGFSPRR

SEQ ID NO: 8117 - DNA, 1140 bp, Brucella abortus biovar 1 str. 9-941
  CDS (1)..(1140): transl_table=11
atggccgaagccgaggcaacagcaaccactgaagctggccgcattcccgttaccgttctgaccggatatctgggctcggggaaaacgacccttctcaatcgcatcctgaccgaaaaccacggcaagcgctatgccgtcatcgtcaatgagttcggcgaaatcggcatcgataacgacctcatcgtcgaatcggacgaagaaatctacgagatgaacaatggctgcatctgctgcaccgtgcgcggcgacctgatccgcgtggtggaaggcctgatgcgccgccccggacgttttgacgccattgtggtggagacgacgggccttgccgatccggttccggttgcgcagacttttttcatggatgacgacgtgcgcgccaagaccgggcttgatgccgttgtcgcccttgtggatgccaagcacctgccgctgcgcctgaaggacagccgcgaggcggaagaccagatcgcatttgccgatgtcgtgctcatcaacaagaccgacctcgtgacgccggaagaactggcggcggtcgaagccaccgtgcgcgccatcaacccgcacgcaatcatccaccgtaccgagcgcgcatcgattccgctcgaccgcgtgctggaccgtggcgccttcgacctgaagcgcgttctggacaatgatccgcacttcctcgaccatgacgacccggaccatgtctgcggccccgattgcgaccacgatcatcatcaccaagggcatcatcaccatgggcatgaccatcaccatcatgatcatcacgatcacgaccatgtttgcgggccggactgcgatcacgatcacgatcacgatcatgcctcgcccatccacgacgttacggtgaagtccgtttcgctgcgaacaggtgaaattgatccggcgaaatttttcccatggatccagaacattacccagacgcaaggcccgaatatcctacgcctgaaaggcatcatcgccttcaaggacgatccggaccgctatgtcgtgcagggcgtgcacatgattatcgaaggcgatcaccagcgcgcgtggaagccggaagaaaagcatgaaagccgcctcgtcttcatcgggcgcgagcttgatccggcggcattgaaagccggttttgagaactgccgggcctga

SEQ ID NO: 8118 - protein, 379 aa, Brucella abortus biovar 1 str. 9-941
MAEAEATATTEAGRIPVTVLTGYLGSGKTTLLNRILTENHGKRYAVIVNEFGEIGIDNDLIVESDEEIYEMNNGCICCTVRGDLIRVVEGLMRRPGRFDAIVVETTGLADPVPVAQTFFMDDDVRAKTGLDAVVALVDAKHLPLRLKDSREAEDQIAFADVVLINKTDLVTPEELAAVEATVRAINPHAIIHRTERASIPLDRVLDRGAFDLKRVLDNDPHFLDHDDPDHVCGPDCDHDHHHQGHHHHGHDHHHHDHHDHDHVCGPDCDHDHDHDHASPIHDVTVKSVSLRTGEIDPAKFFPWIQNITQTQGPNILRLKGIIAFKDDPDRYVVQGVHMIIEGDHQRAWKPEEKHESRLVFIGRELDPAALKAGFENCRA

SEQ ID NO: 8119 - DNA, 1065 bp, Pseudomonas syringae pv. syringae B728a
  CDS (1)..(1065): transl_table=11
atgaaaacactggccaagcttcccgtcaccatcgtcaccggcttcctcggctcgggcaagaccaccctgttgcggcacatgctcgacaacgccgaagggcggcgcattgcggtcatcgtcaatgagttcggcgagctgggcatcgacggagaaatcctcaagcagtgcacgatcggctgcaccgaagaagaagccaacggccgggtgtacgaactggccaatggctgcctgtgctgcaccgtgcaggaagagttcttcccggtgatgcgcgaactggtcgcgcgccgtggtgacctggaccatatcctgatcgaaacctcggggctggcgctgcccaagccgctggtccaggcttttcagtggccggaaatccgcaacgcctgcacggtcgatgcggtgatcacggtggtcgacagcccggcggtactggccggtaccttcgctgccttcccggatcaggtcgatgcgcagcgcaaactcgatcccaacctggaccacgagtcgcccctgcacgaactgtttgccgatcaactggccagcgccgatctggtgatcctcaacaaggccgacatgatcgacgccgaaggtctggcgacggtgcgtgccgaagttgccgaggagctgccgcctgcggtcaaggtgatcgaagccagcagcggtcgcctgccgatcagcgtgctgctgggtgttggtgccgagtccgagctgcacatcgacgctcgcaagacccaccatgatcaccacgacgatgacgatcatgatgaccacgatcacgacgcgttcgattcgatttccctgaagctgccgcaagccgatgaaaaagtcctgctcgatgcactgaatcaactggtggtgcaacacggcattctgcgtgtgaagggcttcgcggccattcccggcaagccgatgcgcctgctgattcaaggtgtcggcacgcgtttcgacaagcacttcgaccgcgcctggcgtgccgatgaagagcgtgccacgcacctggtgctgattggtcaggagctggatgccgcagccctgcaagcgcaactcaatgctgcgattgccggctga

SEQ ID NO: 8120 - protein, 354 aa, Pseudomonas syringae pv. syringae B728a
MKTLAKLPVTIVTGFLGSGKTTLLRHMLDNAEGRRIAVIVNEFGELGIDGEILKQCTIGCTEEEANGRVYELANGCLCCTVQEEFFPVMRELVARRGDLDHILIETSGLALPKPLVQAFQWPEIRNACTVDAVITVVDSPAVLAGTFAAFPDQVDAQRKLDPNLDHESPLHELFADQLASADLVILNKADMIDAEGLATVRAEVAEELPPAVKVIEASSGRLPISVLLGVGAESELHIDARKTHHDHHDDDDHDDHDHDAFDSISLKLPQADEKVLLDALNQLVVQHGILRVKGFAAIPGKPMRLLIQGVGTRFDKHFDRAWRADEERATHLVLIGQELDAAALQAQLNAAIAG

SEQ ID NO: 8121 - DNA, 1008 bp, Pseudomonas syringae pv. syringae B728a
  CDS (1)..(1008): transl_table=11
atgagcattgccctgaacgtgattaccggcttcctcggcagcggcaagaccacgttgctcaaacgcctgctggccgatgaaaacatgggcgacaccgcactgctgatcaacgaattcggcgatgtcggtatcgatcatctgctggttgaagaggtcgcaccggacaccgtgctgctgcccagcggttgtgtctgttgcaccgttcgcggtgaattgaaagacgcgctgctcggtcttctggagcggcgtaatcgaggtgaaattcctgcgttccgccgggtgattctggagactaccggcctggccgatccggcaccgattctcaccacgctgagcaacgacccgcaactgcgcgggcgttttcatatcggcctgatcgtcacgctggtggacgcctgccacgcgacgctgcaagagcgtctgcatccggagtggctggcgcaggtcgcggcggcggaccggctgctgttgagcaagaccgatctggtcgacgagtcggtgctggatggcctgcgcgagcatctgcaagcgctgaatttttcggcgccgctgctggatacagcggacgtccacagcggcgatcagttgctgctgggcgagggcatgcgcagcgacgaaccggccgctgaagtgacgcgctggcaactgcaccgggtactgtcgacctccgcgcggcatggtgatgcgcaagtctgttgcctgacgttcgagcgccctctggactgggtcggcttcggggtgtggctgtcgatgctgttaagatgccacggtgaacgaatcctccgcgtcaaagggctgctcaacgtgaacgacaatcaggctcccatcgtgattcatggtgtgcagcattgcctgcatgcgccggtgcaccttgccgcctggccgggcgaggatcgcacctcacggctggtgttcatcctgcgcggtctcgatcccgatctgctgcgtcgttcgtttgaagtcttctccggcagtttcgcgccgccgctcggcgagtcgtcagcatga

SEQ ID NO: 8122 - protein, 335 aa, Pseudomonas syringae pv. syringae B728a
MSIALNVITGFLGSGKTTLLKRLLADENMGDTALLINEFGDVGIDHLLVEEVAPDTVLLPSGCVCCTVRGELKDALLGLLERRNRGEIPAFRRVILETTGLADPAPILTTLSNDPQLRGRFHIGLIVTLVDACHATLQERLHPEWLAQVAAADRLLLSKTDLVDESVLDGLREHLQALNFSAPLLDTADVHSGDQLLLGEGMRSDEPAAEVTRWQLHRVLSTSARHGDAQVCCLTFERPLDWVGFGVWLSMLLRCHGERILRVKGLLNVNDNQAPIVIHGVQHCLHAPVHLAAWPGEDRTSRLVFILRGLDPDLLRRSFEVFSGSFAPPLGESSA

SEQ ID NO: 8123 - DNA, 978 bp, Pseudomonas syringae pv. syringae B728a
  CDS (1)..(978): transl_table=11
atgactgagttgcaacccatccccgtgaccgtgctgaccggttttctgggcgccggcaagaccaccttgctgcgccacctgctcaaggccgaacacggcctgaaaatcgccgtgatcgaaaacgaattcagcgatgctggcatcgacagccagttgctcggcaccgaccctgtacagatcatgaccctgtccaacggttgcgtgtgctgcaccatccacaccgacctgaccaaggcgctctacctgttgctggagcgtatggacagcggcgaaatcgcgttcgaccgactggtgatcgaatgcaccggcctggctgacccggcgccggtcgcgcagaccttcttcattgatgaagaattgcgcgagcgttacatcctcgacggcatcatcaccctggtcgacgccgcgcacgccgatacccacctggcgcaaaccatcgcccaggcgcagatcggctttgccgaccggttgctggtcagcaagcgtgatctggtcgacgacgcagccttcgaagccctgagtgcgcgcctgacccgcatcaaccgccgcgcgccgatccgtatcgtcgagcacggcaaaatcgacctcgccgaactgctcgacgtacgcggcttcaacctcaacgctgacctgggcggcggcatgatcctgcgcccgctggccccggccggcaattccgctgaccgcatcagcagcctggtcctgcgcagcgacaaaccactgaatctggaccgcctcagcgagttcatgaatgaactgctcgaagaccacggcaaacaactgctgcgctacaagggcgtgctcaacatcgaagacgaaccgcgcaagatggtgtttcagggcgtgctcaagctgtacggcttcgactgggacaccgagtgggccgaaggcgaaaagcgcgagagcgtgattgtgttcattgccgatgagttgccggaggagaagatacgggcggggttcgagaaggtatgcggctga

SEQ ID NO: 8124 - protein, 325 aa, Pseudomonas syringae pv. syringae B728a
MTELQPIPVTVLTGFLGAGKTTLLRHLLKAEHGLKIAVIENEFSDAGIDSQLLGTDPVQIMTLSNGCVCCTIHTDLTKALYLLLERMDSGEIAFDRLVIECTGLADPAPVAQTFFIDEELRERYILDGIITLVDAAHADTHLAQTIAQAQIGFADRLLVSKRDLVDDAAFEALSARLTRINRRAPIRIVEHGKIDLAELLDVRGFNLNADLGGGMILRPLAPAGNSADRISSLVLRSDKPLNLDRLSEFMNELLEDHGKQLLRYKGVLNIEDEPRKMVFQGVLKLYGFDWDTEWAEGEKRESVIVFIADELPEEKIRAGFEKVCG

SEQ ID NO: 8125 - DNA, 1209 bp, Pseudomonas syringae pv. syringae B728a
  CDS (1)..(1209): transl_table=11
atggcaaatcttctacccgttaccgttctgtccggttttctcggcgccggaaaaagcactttactcaattacgtgctgcgcaaccgtgaaaacctgcgggttgcggtgatcgtcaacgacatgagcgagatcaacatcgacggcagcgaagttcagcgtgatgtcagcctcaaccgcgccgaagaaaagctgatcgagatgagcaatggctgcatctgctgcaccttgcgcgaggatctgctcgaagaggtcagccgcctggcacaggacggtcgttttgattacttattgatcgaatccacgggaatctccgaaccgctgccggtggctgaaaccttcactttccgtgacgaggccggcaaaagcctgatggacctggcgcgcctggacaccatggtcaccgtggtcgacggcgtgaacttcctgctcgattacgaggccgcagacggcttgtccacacgcggtgaaaccatgggtgaagacgatgatcgctcgattaccgacctgctgatcgagcagatcgagtttgccgacgtcatcctgcttagcaagatcgacctgatcagttccattgagcgtgaagagctgatggcgatcctcaagcgcctcaacccggaggccgagattgtgccgatggtgatgggtcaggtgccgttggcgacgattctcaacacagggcgctttgacttccagcgtgcttcccaggcaccgggctggctcaaggaaatgcgcggcgaacacatgccggaaaccgaagagtacggcattgcatcaaccgcctatcgtgctcgccggccgttccatccggagcgttttttcgatttcatcaatcgtccctggattaacggcaagctgctgcgctccaaaggcttcttctggctggccagcaaatacaaggatgcgggcagctggtcgcaggcaggcggtttgatacgccatggctttgccgggcgttggtggcgtttcgtgaaccgcgacagctggcccgaggacaaggaaagcgtcagttccattctggagaactggtcgactgagactggcgactgtcggcaggaactggtgttcatcggccagaacattgattttgcgcggctgaccgccgagctggacaactgcctgctcactgatgcggagatggaggagggtgtcgagcgttggcgtgcgctggccgacccgtttggcgaatggcacgcagaggtggctgcctga

SEQ ID NO: 8126 - protein, 402 aa, Pseudomonas syringae pv. syringae B728a
MANLLPVTVLSGFLGAGKSTLLNYVLRNRENLRVAVIVNDMSEINIDGSEVQRDVSLNRAEEKLIEMSNGCICCTLREDLLEEVSRLAQDGRFDYLLIESTGISEPLPVAETFTFRDEAGKSLMDLARLDTMVTVVDGVNFLLDYEAADGLSTRGETMGEDDDRSITDLLIEQIEFADVILLSKIDLISSIEREELMAILKRLNPEAEIVPMVMGQVPLATILNTGRFDFQRASQAPGWLKEMRGEHMPETEEYGIASTAYRARRPFHPERFFDFINRPWINGKLLRSKGFFWLASKYKDAGSWSQAGGLIRHGFAGRWWRFVNRDSWPEDKESVSSILENWSTETGDCRQELVFIGQNIDFARLTAELDNCLLTDAEMEEGVERWRALADPFGEWHAEVAA

SEQ ID NO: 8127 - DNA, 1326 bp, Xanthomonas campestris pv. campestris str. 8004
  CDS (1)..(1326): transl_table=11
atgcctgtcctcgctccccgcgattcgcgcctgcccgtcaccgtgttgtccggcttcctgggcgccggcaagaccaccttgctcaaccgcatcctgcacaaccgcgaggggctgcgggtggcggtgatcgtcaacgacatgagcgagatcaacatcgatgcgcagctgctacgcgagggtggggcggcgctgcggcgcaccgacgagacgctggtggaattcagcaatggctgcatctgctgcacgctgcgcgacgacctgctgcaggaagtgaagcgcctggccagcgagcgccgctacgactatctgttgatcgaatccaccggcatcgccgagccgatgccggtggcggccacctttgcggtgcgcgatgccgatggtttcagcctgtcggatatcgcccggctcgacaccatggtgacggtggtggacggcagccgttttctcgaggatttcggctctgcggccacgctggccgagctcggccagcaagccggcccggacgatacgcgcgggctggtgcaattgcttggcgaccaggtggagttcgccgacgtgctggtgatcagcaagtgcgaccagatcgacacgccgcgtctgcaccgcctgcatgccgtgttgcgtgcgctcaatcgcgatgcggcgatcgtcgatgccgcgcatggcgaggtgccgctgcggcagctgctggacaccgggcgcttcgacttcacccgcgcgcagctggcgccgggctggatgcaggagttgcgcggccagcacacgccggagaccgaggaatatggcatcaccagtttcgtctatcgtgcgcgccggccgtttcatccgcagcgttttgcgcgcatggtgcaaggtgggctgccgcaggtgattcgcagcaagggatttttctggttggccagccgcatggattgggttggcgaattgtccagcgtgggtggcgcgacccagaccaatgcagcgggcttctggtttgccgcacgccatcgcgtggatgcgcatgccatcggcgagccgctgcagaccagcatcacgccattgccgtataccgatatcggctggcagcgtcagcagacgcaatgctggaccgcgccgctgccgcaactgcacgaggttggcgatgccagcgagtacgccgcgatgcagcggctgtggcacccgctatggggcgaccgtcgccaggagctggcggtgatcggcgtggacatggatgcgccgcgcacgcgcgctgcgctggatgcctgcctgctcagcgatcacgaactgcgccagggcccggcgcaatggcaactgctggacgatccgtttccgcactggcagcgttga

SEQ ID NO: 8128 - protein, 441 aa, Xanthomonas campestris pv. campestris str. 8004
MPVLAPRDSRLPVTVLSGFLGAGKTTLLNRILHNREGLRVAVIVNDMSEINIDAQLLREGGAALRRTDETLVEFSNGCICCTLRDDLLQEVKRLASERRYDYLLIESTGIAEPMPVAATFAVRDADGFSLSDIARLDTMVTVVDGSRFLEDFGSAATLAELGQQAGPDDTRGLVQLLGDQVEFADVLVISKCDQIDTPRLHRLHAVLRALNRDAAIVDAAHGEVPLRQLLDTGRFDFTRAQLAPGWMQELRGQHTPETEEYGITSFVYRARRPFHPQRFARMVQGGLPQVIRSKGFFWLASRMDWVGELSSVGGATQTNAAGFWFAARHRVDAHAIGEPLQTSITPLPYTDIGWQRQQTQCWTAPLPQLHEVGDASEYAAMQRLWHPLWGDRRQELAVIGVDMDAPRTRAALDACLLSDHELRQGPAQWQLLDDPFPHWQR

SEQ ID NO: 8129 - DNA, 879 bp, Staphylococcus haemolyticus JCSC1435
  CDS (1)..(879): transl_table=11
atggaaatcattattgttggaggtttcttaggcagcggtaagacaacgacattgaaccacctgattacagacgccttggatcataacttaaaaaccgcattaattataaatgaattcggaaaaatgagtgtcgatagtcaactcattcatccaactattcctatcagtgagattgtagaaggctgcatttgctgtgctatgaaatcaaacgtttcacaacaattgcatgaaatatatttagaacatcaaccagatcttgtgtttatagaatgtagtggtatcgctgaaccattggccgttgttgacgcctgtctaacacctgtactagctccaattaccactattagaagtatgcttggcatcattgatgcaaagttgtacgagaagatagaaacataccctagagatattcaagcgttattctatgaacagctaagttattgttctacgctatttgtaaataaaattgatattgctgattttaatcaagtcgctcgcttattaagacatctagaggtcattaatagagacgcaaacatacaagtaggacaatggggagaattagcgttaaacacattgttaaacgtgaaacatttagatgctaaacaaagaggtacactccatcacgccatcaatcatcagttgatagatacgcctcgctcacaaacaaaagcagatttcattgaaaggttaacccaactcccacaacaagtataccgtgtgaaaggatttgtgcgttttacagatagtaaattgatacatttagttcaatacgctgaaggagaaatcgaattaacaccgattcaattcaaatcagatgttcctttgtatttggtagttattggaaagcacttagatgctatcgagttagacttataa

SEQ ID NO: 8130 - protein, 292 aa, Staphylococcus haemolyticus JCSC1435
MEIIIVGGFLGSGKTTTLNHLITDALDHNLKTALIINEFGKMSVDSQLIHPTIPISEIVEGCICCAMKSNVSQQLHEIYLEHQPDLVFIECSGIAEPLAVVDACLTPVLAPITTIRSMLGIIDAKLYEKIETYPRDIQALFYEQLSYCSTLFVNKIDIADFNQVARLLRHLEVINRDANIQVGQWGELALNTLLNVKHLDAKQRGTLHHAINHQLIDTPRSQTKADFIERLTQLPQQVYRVKGFVRFTDSKLIHLVQYAEGEIELTPIQFKSDVPLYLVVIGKHLDAIELDL

SEQ ID NO: 8131 - DNA, 1200 bp, Staphylococcus haemolyticus JCSC1435
  CDS (1)..(1200): transl_table=11
atgggcaagatacctgtaacggtattgagtggttaccttggatcaggtaaaacaacattacttaaccacattttaaataatcgggaaggtcgtcgaattgcggttattgttaatgatatgagcgaggtcaatattgataaagacttagttgcagatgggggtggactatcaagaacggatgaaaaactagtagaactgtcaaatggttgtatttgctgtacgttaagggacgatttattacaagaagttgagcgcttagtagaaaaggggaatattgattatatcgtgattgaatctacaggtatatctgaaccggtacctgtggctcaaacattctcttatattgacgaagcattaggtatcgatttaacgtcaatctgtaaactcgatacgatggtaaccgttgtggatgctaatcgatttattaatgacattaattccgaggatttacttgtggatcgtgatcaaggtgcagatcaaacagatgagcgctcaattgctgatttacttattgatcaagtggaattctgtgatgttttagtgctaaataagacagatttagtaaccgaagcagaattaacaaaattagaaaatatcttaagaaagttacaaccagatgcacatctaattaaaacgacaaatgccgaagttgatattaacgaagtattaaacacaggtcgctttgactttgaacaagcgagtaactctgcgggatggataaaggaattaactgaaggtggtcacgcggaacatacacctgaaacagaagagtatgggattggttctttcgtgtattcgagacgattaccgtttcacgcgaaacgtttcaacgattggttagaacaaatacctaataatattgttcgtgcaaaaggtatcgtctggttggcacaatataatcaagttgcatgtctactatcacaagcaggttcatcttgtaatattagtccagtaacctattgggtggctgcgatgtccaaagaacaacgagaacaaattttaaatcagcgacctgatgttgcacaaagttgggacatagaatatggtgacagaaatacacaatttgtgattataggtactgaattagatcaagaaaaaattgtgaaagaattagaccagtgcttagtcaatggtgatgaagttgatagcgactggaatcaattagaagatccatatcattggcaaattcgaaaagcttaa

SEQ ID NO: 8132 - protein, 399 aa, Staphylococcus haemolyticus JCSC1435
MGKIPVTVLSGYLGSGKTTLLNHILNNREGRRIAVIVNDMSEVNIDKDLVADGGGLSRTDEKLVELSNGCICCTLRDDLLQEVERLVEKGNIDYIVIESTGISEPVPVAQTFSYIDEALGIDLTSICKLDTMVTVVDANRFINDINSEDLLVDRDQGADQTDERSIADLLIDQVEFCDVLVLNKTDLVTEAELTKLENILRKLQPDAHLIKTTNAEVDINEVLNTGRFDFEQASNSAGWIKELTEGGHAEHTPETEEYGIGSFVYSRRLPFHAKRFNDWLEQIPNNIVRAKGIVWLAQYNQVACLLSQAGSSCNISPVTYWVAAMSKEQREQILNQRPDVAQSWDIEYGDRNTQFVIIGTELDQEKIVKELDQCLVNGDEVDSDWNQLEDPYHWQIRKA

SEQ ID NO: 8133 - DNA, 930 bp, Staphylococcus haemolyticus JCSC1435
  CDS (1)..(930): transl_table=11
atgataaataataaaaatgaaaaagtatcaattacaatcgtaaatggctttttaggaagtggtaaaactacatttctaaaacattatatagagcaattattaaaaaaagatgagaaaataacaattataatgaatgaatttggatcttttgacgttgatagtttattacttggaaatgatgtttccattcattctttaattaatggctgcgtatgctgtgatttaaataacgatttagttaaccaattgaaacagttgattgatcaaacagatacgagtcatattcttatagaagcaactggtttagcgcatccccttgagatttattcggcttgccaagaccctacaataataaaaaatgttcatgaaccaacaattattggtattgtagatgcacaaagattcactaaaaaagaagtctatagtccttcaacaactcagttattagaagaacaattacgttatagtgatacgataatactaaataaaactgatttaataggtgaagaagcacttaacgaagttaaagaaaatttaaataaactcaatccacaagcgcctataattattaccacttatagtcaatttaatgatgaacagatcaacggtaaagtgattcaacataatgaaattcagcataaacatatacatcatcatggaattcagtcgatgcagtatacatttacagcagcaatagaccgtcagttattttatcaatttattatgcgtttgccagatagtgtacttcgcttaaaaggatttgtgaagtttagagatctaccagaagtaacatatgaatttcaatatgcaatgggcttacctgattatggcattatctataaagacgtaccgatgactatcgttaccattggagagtcattggatacagatagattacgtaatcaacttgatatgattcaattcacataa

SEQ ID NO: 8134 - protein, 309 aa, Staphylococcus haemolyticus JCSC1435
MINNKNEKVSITIVNGFLGSGKTTFLKHYIEQLLKKDEKITIIMNEFGSFDVDSLLLGNDVSIHSLINGCVCCDLNNDLVNQLKQLIDQTDTSHILIEATGLAHPLEIYSACQDPTIIKNVHEPTIIGIVDAQRFTKKEVYSPSTTQLLEEQLRYSDTIILNKTDLIGEEALNEVKENLNKLNPQAPIIITTYSQFNDEQINGKVIQHNEIQHKHIHHHGIQSMQYTFTAAIDRQLFYQFIMRLPDSVLRLKGFVKFRDLPEVTYEFQYAMGLPDYGIIYKDVPMTIVTIGESLDTDRLRNQLDMIQFT

SEQ ID NO: 8135 - DNA, 1008 bp, Pseudomonas fluorescens Pf-5
  CDS (1)..(1008): transl_table=11
atgagcctgcccctgaacgtcatcaccgggtttctcggcagtggcaagaccaccttgctcaaccgcctgttgcaggaccagagcctgggggacacggcgctgctgatcaacgagttcggtgatatcggcatcgatcatttgctggtgcaggaggtggcgccggacacggtgctgctgcccagcggctgtgtctgctgttcggttcgcggcgaactgaaagaggcgctgttggcgctcctggcgcggcgtagccggggcgaggttccggcctttcgccgggtgctgctggaaaccaccgggctggccgacccggcgccgatcctggccacggtgaacaacgatccgcaattgcgcgggcgggtgcacatcggcctgctggtgaccctggtggacgccagccacgcggcgttgcaggagcgcctgcacccggagtggctggcccaggtggcggccgcggatcgcttgctgctgagcaagaccgattgtgtcgacgaagcaacccaggcggcattgcgcgagcatttgcagcggctcaatcccggggcgcccctgttgctgacccaggcgatccagagtggcgatcagctgttgctgggggaggggctgcgcggtgcgacggcagagcgggaagtggcgcgctggcagttgcaggggccactcaaagcggctgcgccacagcatggcgcggcgcaagtgtgcagcctggagttcgagcaagccctggattgggtgggcttcggggtctggttgtcgatgctgctaagatgccacggcgaacgaattctgcgggtgaaaggattgctcaacatcaacgccaaccaggcccccatcgtcatccatggcgtgcagcattgcctgcacgcacccgtgcatctgccccgttggcccagtgccgaccatcgctcgcggctggtgtttatcctgcgcgggctggagcccgaacaactgcgccgctccttcgaggtgttcgcccgcagtttcgccccggccgccggggagggtgcctga

SEQ ID NO: 8136 - protein, 335 aa, Pseudomonas fluorescens Pf-5
MSLPLNVITGFLGSGKTTLLNRLLQDQSLGDTALLINEFGDIGIDHLLVQEVAPDTVLLPSGCVCCSVRGELKEALLALLARRSRGEVPAFRRVLLETTGLADPAPILATVNNDPQLRGRVHIGLLVTLVDASHAALQERLHPEWLAQVAAADRLLLSKTDCVDEATQAALREHLQRLNPGAPLLLTQAIQSGDQLLLGEGLRGATAEREVARWQLQGPLKAAAPQHGAAQVCSLEFEQALDWVGFGVWLSMLLRCHGERILRVKGLLNINANQAPIVIHGVQHCLHAPVHLPRWPSADHRSRLVFILRGLEPEQLRRSFEVFARSFAPAAGEGA

SEQ ID NO: 8137 - DNA, 1284 bp, Pseudomonas fluorescens Pf-5
  CDS (1)..(1284): transl_table=11
ttgctgcaaggccactgcatgggcgtcgacgacgccggtgggaaggcgcagcaatcgccggtccgacgactggcaagccctcagccaggagacctgcctcgatcccagattctcactacaaccgggcggggtgatccggtggcgaaatctccgcgcgcccggcgttgcggttctcgtcccgtttgcccgcctccttttgccaaagggcatccgatgaaaacactggccaaacttcccgtcaccatcgtcaccggcttccttggctcgggtaagaccaccttgctccggcacatgctggacaacgcccagggccggcgcattgcggtgatcgtcaacgaattcggcgagctgggcatcgacggcgaaatcctcaagcaatgcgccatcggctgcaccgaggaagaggccagcggccgagtctacgaactggccaacggttgcctgtgctgcaccgtgcaggaggagttcttcccggtgatgcgcgaactggtggcgcgccgcggcgacctggaccacatcctcatcgaaacctccggcctggcgctgcccaagcctctggtccaggccttccagtggccggaaatccgcagtgcctgcaccgtcgatgcggtgatcaccgtggtcgacagcccggccgtggccgccggcaccttcgctgccttccccgatcaagtggacgcccagcgcaagctcgaccccaacctggaccacgaatcgccgctgcatgagctgttcgccgaccagctgtccagcgccgacctggtgatcctcaacaagaccgacctgatcagccccgaagacctggccaaggtgcgcctggaagtggccgaggagctgccgccggcggtcaaggtcatcgaagccagcagcggtcgcctgcccctggacgtgctgctgggcctgggtgccggttccgaggaacacatcgacggccgccacagccatcacgaccatcaccatgacggcgatgacgatcacgacgaccacgatcacgacgccttcgattccatctccatcgagctgccccaggccgacgaaagcctgctgctggacgccctgacccaactggtggtcaagcacggcatcctgcgggtcaagggtttcgccgcgatccccaacaagccgatgcgcctgctgatccagggcgtgggcacgcgcttcgacaagcacttcgaccgcaagtggggcgccgacgaggcccgtaccacgcgcctggtgctgatcggccaggaactggacgccgcccagctcgaagcgcaactgcgcgccgcactcagcgtctaa

SEQ ID NO: 8138 - protein, 427 aa, Pseudomonas fluorescens Pf-5
MLQGHCMGVDDAGGKAQQSPVRRLASPQPGDLPRSQILTTTGRGDPVAKSPRARRCGSRPVCPPPFAKGHPMKTLAKLPVTIVTGFLGSGKTTLLRHMLDNAQGRRIAVIVNEFGELGIDGEILKQCAIGCTEEEASGRVYELANGCLCCTVQEEFFPVMRELVARRGDLDHILIETSGLALPKPLVQAFQWPEIRSACTVDAVITVVDSPAVAAGTFAAFPDQVDAQRKLDPNLDHESPLHELFADQLSSADLVILNKTDLISPEDLAKVRLEVAEELPPAVKVIEASSGRLPLDVLLGLGAGSEEHIDGRHSHHDHHHDGDDDHDDHDHDAFDSISIELPQADESLLLDALTQLVVKHGILRVKGFAAIPNKPMRLLIQGVGTRFDKHFDRKWGADEARTTRLVLIGQELDAAQLEAQLRAALSV

SEQ ID NO: 8139 - DNA, 927 bp, Pseudomonas fluorescens Pf-5
  CDS (1)..(927): transl_table=11
atgaacagcaccccgagcatcccggtaaccgtggttgcaggctttctcggcgccggcaagaccaccctgctcaaccgcatggtgcaacgcgccgacagcggccggctggcggtgatcgtcaacgatttcggcgagctgaacatcgatgcggcgatcatcgccgaggtcaccgacgcggtgtacagcctgcagaacggctgcatctgctgcaccgtgcaggaggacctgctggcgcaactggtgagcctgtccaagctgcgcccggccctggagcgaattgtcatcgagtgcagcggcgtctccgacccgcagcgcatcgtgcagaccatcggctacccgcaactgcgcaaccgcctgcacctggacgcggtgatcaccctggtggacgccagcggctaccaggacctggaaggggaaatggcccgcctgtcccgagcccaggtggcctgcgccgactgggtgctgctgaacaaggccgacctggtgagcgccgagcaattgcagagcatccgcgccagcctcggcaatcgtgccccggtgttcgacacggtgcaggccgagctgccccccgagctgctgctggcgccgccggtgcgctccaccgaagtgctgttcaaggccctgccccaggcccacgaccagttgttcgaaagctgggtgtggaaaagctcgcgaccgctgcagcccaaggctttgcgggactggctggcgcgcctgccagccgacctgctgcgcctcaagggcctggtgcgccttgaaggcaatgaacaaccttattggttgcagcatgtgggcaaccgcagccagttcaccctggccgccgatcagcccaccgagcatgccgcgcaattggtattcatcgcccgccgaggcagcgatctgcgccaggaactggaggctggggtcagcgatacacaagtgctttga

SEQ ID NO: 8140 - protein, 308 aa, Pseudomonas fluorescens Pf-5
MNSTPSIPVTVVAGFLGAGKTTLLNRMVQRADSGRLAVIVNDFGELNIDAAIIAEVTDAVYSLQNGCICCTVQEDLLAQLVSLSKLRPALERIVIECSGVSDPQRIVQTIGYPQLRNRLHLDAVITLVDASGYQDLEGEMARLSRAQVACADWVLLNKADLVSAEQLQSIRASLGNRAPVFDTVQAELPPELLLAPPVRSTEVLFKALPQAHDQLFESWVWKSSRPLQPKALRDWLARLPADLLRLKGLVRLEGNEQPYWLQHVGNRSQFTLAADQPTEHAAQLVFIARRGSDLRQELEAGVSDTQVL

SEQ ID NO: 8141 - DNA, 972 bp, Pseudomonas fluorescens Pf-5
  CDS (1)..(972): transl_table=11
ttgcacaaccctattcccgtgaccgtgctcagcggttttcttggcgccggcaagaccactttgttgcgccacctgctcaaggccgagcacggcctgaaaatcgccgtgatcgagaacgaattcagcgatgccggcatcgacacccagttgctgggcgagcagccggtacaggtcatgaccctgtccaacggctgcgtctgctgcaccatccacaccgacctgaccaaggccctgtacctgttgctggagcgtctggacagcggcgagatcgcctttgaccggctggtgatcgagtgcaccgggctggccgatccggcgccggtggcacagaccttcttcatcgatgaggaactgcgcgaacgctatatcctcgacggcatcatcaccctggtggacgccaagcacgccgagttccacctgacccagaccattgcccaggcgcagatcggttttgccgaccggctgctggtgagcaagcgtgacctagtggacgaggcgactttcgaagccctctgccagcgcctgacccggatcaaccgccgggcaccgatccgcctggtggagcacggccagatcgacctggccgagctgctggatgtgcgggggttcaatctcaatgccgacctggggggcggcctcagcctgcggccagtgagcaaggcgccgtcagtggaccggatttccagcctggtgctgcgcaccgagcaagccctggacctggatcgcctgagcgaattcatgaatgagctgctggaagaccacggcaagcaactgctgcgctacaaaggtgtgctgagcgttatcgacgagccccggcgcatggtgttccagggcgtgctcaagctctatggcttcgattgggacagcgaatgggccgaaggcgaagtgcgcgagagcgtgatggtgttcattgccgacgatctgccggaagagaagatccggcaggggttcgagcggatgctcgcgggctga

SEQ ID NO: 8142 - protein, 323 aa, Pseudomonas fluorescens Pf-5
MHNPIPVTVLSGFLGAGKTTLLRHLLKAEHGLKIAVIENEFSDAGIDTQLLGEQPVQVMTLSNGCVCCTIHTDLTKALYLLLERLDSGEIAFDRLVIECTGLADPAPVAQTFFIDEELRERYILDGIITLVDAKHAEFHLTQTIAQAQIGFADRLLVSKRDLVDEATFEALCQRLTRINRRAPIRLVEHGQIDLAELLDVRGFNLNADLGGGLSLRPVSKAPSVDRISSLVLRTEQALDLDRLSEFMNELLEDHGKQLLRYKGVLSVIDEPRRMVFQGVLKLYGFDWDSEWAEGEVRESVMVFIADDLPEEKIRQGFERMLAG

SEQ ID NO: 8143 - DNA, 1089 bp, Pseudomonas fluorescens Pf-5
  CDS (1)..(1089): transl_table=11
ttgccgagcctgggcgaagctccgcaggaccttcagcgctcccaagagcggcgtcgaatcgagcggattttcgcccagggcgggaagggcgtagcatcacctcacaggtttcccggaccccttcccatgctgcagaacatccccacccacgtgatcgccggccccctgggcgccggcaagaccagcttgatccgccatctgctgagccagcgcccggccgccgagcgctgggcggtgctgatcaacgagtttggccagatcggcctggacgcggccctgctgacccgcgacgaagatggcatcgccctgggcgaagtggccggcggctgcctgtgctgcgtcaacggtgcaccgttccaggtgggcctgggccgcctgttgcgcaaggcccggccggaccgcctgcttatcgagccctcgggcctcggccacccggcccaattgctcaagcagttgaatgaagcgccctggaagggcgtgctggcggtgcaaccctgcgtgctggtgctggatgcccaagcgctggccgctggcaagccgttgccccgggcgcagcaggatgcgctgtccagcgccggcctgctggtactgaacaaggacgaactgctcagcgacagcgacaggttgcgggtgctggagcaattgccggaccttcccttgttctggacccgccatgccgccttgcccctggccgagctgccgggcctgggagccagcgccgaagcggccctggagcagtcggacattccccagggcctggcccagttgccggccgtgtggagcgatccgacgctgccgatctgcctcagccagtcccaggaggatggctggagcatcggctggcgctggcaccccagccaacagttcgatctggtccgggtcgagcactggctgcagaacctcgactggcgccgggccaagctggtgctgcacagtgatcaaggctggcggtcgggcaacgggctggataattcaccgctgaactggctgcccagcgaatggcgccgggattcgcgcctggagctgatcttcagtagccctcaggacattgccgttctgcaggccagtctcgatgcctgtcgcctgtag

SEQ ID NO: 8144 - protein, 362 aa, Pseudomonas fluorescens Pf-5
MPSLGEAPQDLQRSQERRRIERIFAQGGKGVASPHRFPGPLPMLQNIPTHVIAGPLGAGKTSLIRHLLSQRPAAERWAVLINEFGQIGLDAALLTRDEDGIALGEVAGGCLCCVNGAPFQVGLGRLLRKARPDRLLIEPSGLGHPAQLLKQLNEAPWKGVLAVQPCVLVLDAQALAAGKPLPRAQQDALSSAGLLVLNKDELLSDSDRLRVLEQLPDLPLFWTRHAALPLAELPGLGASAEAALEQSDIPQGLAQLPAVWSDPTLPICLSQSQEDGWSIGWRWHPSQQFDLVRVEHWLQNLDWRRAKLVLHSDQGWRSGNGLDNSPLNWLPSEWRRDSRLELIFSSPQDIAVLQASLDACRL

SEQ ID NO: 8145 - DNA, 1209 bp, Pseudomonas fluorescens Pf-5
  CDS (1)..(1209): transl_table=11
atgaccgaccgtctccccgttaccgtgctgtccggctttctcggcgccggcaaaagcaccttgctcaatcacatcctgcgcaaccgcgaccacctgcgggtggcggtgatcgtcaacgacatgagcgaaatcaacatcgatggcagcgaagtgcagcgcgatgtcagcctcaatcgcgccgaagaaaaactggtggaaatgagcaacggctgcatctgctgcaccctgcgcgaagacctgctggaggaagtgggcaagctggcccgcgacgggcgcttcgactacctgctgatcgaatccaccgggatttccgagccactgccggtggcggaaaccttcacctttcgcgatgaatccggccagagcctggcggatatcgcccggctcgacaccatggtcacggtggtcgacggcatgaatttcctgctggactaccaggccgcgcacagcctggcttcccggggcgaaaccctgggcgaagacgatgaacgttccatcagcgacctgctgatcgaacaggtggagttcgccgacgtgatcctggtcagcaagatcgacctgatcagcagcgaccagcgccaggaactgctggccatcctcaagagcctcaatgcccaggccgagatcgtgcccatggtcatgggccaggtaccgctggcgaagatcctcgacaccgggcgcttcgatttcgagcgcgcggcccaggctccgggctggctgcgggagttgcgcggcgagcatgtgccggaaaccgaggagtacggcatcgcttccaccgcctaccgggcgcggcggccgttccatccccagcgcttcttcgacttcatcaaccggccctgggtcaacggcaagctgctgcgctccaagggcttcttctggctggccagcaagtaccaggaagccggcagctggtcccaggccggtggcctgatgcgccatggctttgccgggcgctggtggcgcttcgtgcccaagcagcactggccccaggacgaagaaggcaccgcggcgatcatgcacaactggaccgcggccaccggcgattgccgccaggaactggtgttcatcggccagaacatcgacttcacccggctttgcgcggagctcgacctgtgcctgctggatgacgatgaaatggccctcggcgtcgagggctggagcctgctgaacgatccctttggcccctggcatgacgaggaagcggcctga

SEQ ID NO: 8146 - protein, 402 aa, Pseudomonas fluorescens Pf-5
MTDRLPVTVLSGFLGAGKSTLLNHILRNRDHLRVAVIVNDMSEINIDGSEVQRDVSLNRAEEKLVEMSNGCICCTLREDLLEEVGKLARDGRFDYLLIESTGISEPLPVAETFTFRDESGQSLADIARLDTMVTVVDGMNFLLDYQAAHSLASRGETLGEDDERSISDLLIEQVEFADVILVSKIDLISSDQRQELLAILKSLNAQAEIVPMVMGQVPLAKILDTGRFDFERAAQAPGWLRELRGEHVPETEEYGIASTAYRARRPFHPQRFFDFINRPWVNGKLLRSKGFFWLASKYQEAGSWSQAGGLMRHGFAGRWWRFVPKQHWPQDEEGTAAIMHNWTAATGDCRQELVFIGQNIDFTRLCAELDLCLLDDDEMALGVEGWSLLNDPFGPWHDEEAA

SEQ ID NO: 8147 - DNA, 1071 bp, Colwellia psychrerythraea 34H
  CDS (1)..(1071): transl_table=11
atgttcagccagatatcgtcaaaaatttcagctatccctactaccctcattaccggttttttaggggtaggaaaaacgacagcaatattgcaattacttgccaataaacccaacaatgaaaactgggctgtgcttgttaatgaatttggcgaaatagggatagattctgcattactcgctggtagcagtaatgaacaaggggtatttattcgtgaagtacctggtggttgtatgtgctgtgcctctggtgtgcctatgcaagtcgcgttaaaccaactcattactaaagccaaacctgacagactacttatagagccgacaggtttaggtcacccaaaagaagtggttgaagtattaaccaagggaaaatttcaagaaacaatatcactgcagtcaatactctgtttagtcgatgctcgaaatcttatcgataagcgctatacagagcatccatcatttgttcagcaactcaacgtggcagacaccatcttagcggcaaaagcagacacctactcagcaaaagatgaagaaaacttagcgctatttattgccgaaaatgagctaacagataagccattacacttaatgcagcacggtaacattgcccctagttggttagcgcaacaacctaaaacagtaatagtaactaaaccaatgattggtattgcggtcccctctttacacgagagttcacatacgattgaactcggttataaaaaagagcgtgagcagagccaagcgctacaaacaagactagcacaagagggatttattgaactcaataatcatggtgagggttatttcagtaaaggttggattttttccgacaagtaccaatttaactataaacaattattcgcattcataaccgcattaaaggcttcgcgtgcaaaaggtgtgatacttaccgaacaagggagttacgccttcaataaggcagggagcgattttagctgcaacaaagttactgattcaaaagatagccgtattgagctaattgataccaatgaaaatgctttaaatattgttaaaagcagagacttattattgctagcgaaagacgccatatag

SEQ ID NO: 8148 - protein, 356 aa, Colwellia psychrerythraea 34H
MFSQISSKISAIPTTLITGFLGVGKTTAILQLLANKPNNENWAVLVNEFGEIGIDSALLAGSSNEQGVFIREVPGGCMCCASGVPMQVALNQLITKAKPDRLLIEPTGLGHPKEVVEVLTKGKFQETISLQSILCLVDARNLIDKRYTEHPSFVQQLNVADTILAAKADTYSAKDEENLALFIAENELTDKPLHLMQHGNIAPSWLAQQPKTVIVTKPMIGIAVPSLHESSHTIELGYKKEREQSQALQTRLAQEGFIELNNHGEGYFSKGWIFSDKYQFNYKQLFAFITALKASRAKGVILTEQGSYAFNKAGSDFSCNKVTDSKDSRIELIDTNENALNIVKSRDLLLLAKDAI

SEQ ID NO: 8149 - DNA, 1209 bp, Colwellia psychrerythraea 34H
  CDS (1)..(1209): transl_table=11
atgcttcacaaaaataagttaccggttactgttctatcgggttttctcggtgccggaaaaaccacagtactaagccatattttgaataatcgtcaaggtaaaaaagtggctgtcatcgttaatgatatgagtgaagtcaatatcgattcagctacggttgctaacgaagtatctctcaaccgcagcgatgaaaagcttgttgaaatgagtaatggctgtatctgttgtacattgcgtgaagatcttctcttagaggttacgaaattagcacaagatggacgatttgattacttggttattgaatctacgggtatttctgagccattgccgatagccgaaacctttactttttccgacgaggacggtatttcattatcagatgtggcaacactggatactatggttacggttgttgatgcggtaaattttttaaaggattacgaagaggcatcttctttacaagaagtaggagagtcgttaggggaagaagacgaacgtagtgtctctgatctactcgttgaccaagttgaatttgccgatgtcatcttgattagcaaaaccgacttggttgatatttctgatattgatcgcctaatagcaatactgaaaacgcttaatacccatgcccgaatcagccctattactcaaggtcaagtcgatattgatgcagtgctgagtactggtttgttcgattttgaacgcgcccagagcgcgccagggtggttgaaggagatgcgaggtgaacacattcctgaaaccgaagaatatggtattagtagctttagttttcttgctcgccgtccgtttcatcctgagaaattttatcactttcttcatgacactgaaaaatttggtaaattaattcgttccaaagggtatttttggttggccactcgtccccaattttcaggtcaatggaatcaggcaggtggcattgctcattatggttttgctgctatgttctggaaatcggtgcccaaaaaagattggcctatcgatgaggagtcattgaacgctatagagaagcagtgggttgagccatttggtgatatgcgtcaagaattagtgttcattggtcagcaactagatcaaggggctatgactaatgcactcaatgaatgcctgttgacagatgatgaattactaaaagggaaaaattactgggcaacattaagtgatccgtttccagagtggagtgaaagcgcgtga

SEQ ID NO: 8150 - protein, 402 aa, Colwellia psychrerythraea 34H
MLHKNKLPVTVLSGFLGAGKTTVLSHILNNRQGKKVAVIVNDMSEVNIDSATVANEVSLNRSDEKLVEMSNGCICCTLREDLLLEVTKLAQDGRFDYLVIESTGISEPLPIAETFTFSDEDGISLSDVATLDTMVTVVDAVNFLKDYEEASSLQEVGESLGEEDERSVSDLLVDQVEFADVILISKTDLVDISDIDRLIAILKTLNTHARISPITQGQVDIDAVLSTGLFDFERAQSAPGWLKEMRGEHIPETEEYGISSFSFLARRPFHPEKFYHFLHDTEKFGKLIRSKGYFWLATRPQFSGQWNQAGGIAHYGFAAMFWKSVPKKDWPIDEESLNAIEKQWVEPFGDMRQELVFIGQQLDQGAMTNALNECLLTDDELLKGKNYWATLSDPFPEWSESA

SEQ ID NO: 8151 - DNA, 1146 bp, Pseudomonas syringae pv. phaseolicola 1448A
  CDS (1)..(1146): transl_table=11
gtgatccggtggcgatccgatccgtgtgccaggcatgcggttctcgtcctgtttgcccgccgcattgccaaagggcacctgatgaaaacactggccaagcttcccgtcaccattgtcaccggcttcctcggctcgggcaaaaccaccctgctgcggcacatgctcgataacgccgaagggcggcgcatcgcggtcatcgtcaatgaattcggtgaactgggcatcgacggagaaatccttaagcagtgcaccatcggttgcaccgaagaagaggccaacggccgggtatatgagctggccaacggctgcctgtgctgcacggtgcaggaagagttcttcccggtcatgcgcgagctggtcgctcgccgtggcgatctggaccacatcctgatcgaaacctcggggctggcattgcccaagccgctggttcaggcttttcagtggccggaaattcgcaacgcctgcacggtcgatgcggtgatcactgtcgtcgacagccctgcggtattggccggtacgtttgctgcgttccccgatcaggtcgatgcgcagcgcaaactcgacccgaatctggaccatgagtcgcctctgcacgagctgttcgctgatcaactggccagcgccgatctggtcatcctcaacaaggccgacatgatcgacgccgaaggtctggcagcggtgcgtgccgaagttgccgaagaactgccgccagccgtcaaggtgattgaagccagcagcggtcgtctgccgatcagcgtactgctgggtgttggcgccgagtccgagctgcacatcgatggtcgcaagacccaccatgatcatcacgacgatgacgatcatgatgaccacgatcacgatgctttcgattcgatttccctgaaattgcctcaggccgatgaaaagttgttgctcgacgcactgaatcaactggtcgtgcagcacggcattctgcgcgtgaagggcttcgcggccattcccggcaagccgatgcgcctgctgatccagggtgtgggtacgcgtttcgacaagcacttcgaccgcgcctggcgcgccgacgaagagcgtgccacgcatttggtgctgattggtcaggagctggatgccgtggtcctgcaagcgcagctcaacgctgcagttgtcggctga

SEQ ID NO: 8152 - protein, 381 aa, Pseudomonas syringae pv. phaseolicola 1448A
MIRWRSDPCARHAVLVLFARRIAKGHLMKTLAKLPVTIVTGFLGSGKTTLLRHMLDNAEGRRIAVIVNEFGELGIDGEILKQCTIGCTEEEANGRVYELANGCLCCTVQEEFFPVMRELVARRGDLDHILIETSGLALPKPLVQAFQWPEIRNACTVDAVITVVDSPAVLAGTFAAFPDQVDAQRKLDPNLDHESPLHELFADQLASADLVILNKADMIDAEGLAAVRAEVAEELPPAVKVIEASSGRLPISVLLGVGAESELHIDGRKTHHDHHDDDDHDDHDHDAFDSISLKLPQADEKLLLDALNQLVVQHGILRVKGFAAIPGKPMRLLIQGVGTRFDKHFDRAWRADEERATHLVLIGQELDAVVLQAQLNAAVVG

SEQ ID NO: 8153 - DNA, 1008 bp, Pseudomonas syringae pv. phaseolicola 1448A
  CDS (1)..(1008): transl_table=11
atgagcattgctctcaatgtgattaccggctttctcggcagcggcaagaccacgttgctcaaacgcctgctggccgatgaagacatgggcgaaactgcgctgttgatcaacgaattcggcgatgtcggtatcgatcatctgctggttgaagaggttgctccggataccgttctgctgcccagcggttgtgtctgctgcaccgtcaggggggagctgaaagatgcgttgctcggccttctggagcgacgtaatcgtggcgagattccagcgtttcgccgggtgatcctggagaccaccggccttgcggatcccgcaccgattctcaccacgctgagcaatgacccgcaactgcgcgggcgttttcatatcggcctgatcgtcacgttggtggacgcctgccacgcaaaactgcaagagcgtctgcatccggagtggctggctcagatcgcggcgtcggaccggctgttgttgagcaagaccgatctggtcgatcagcccgcactggatgcgcttcgtcagcacctgcaagcgctgaatttctctgcaccgctgcgggatacggcgcagatccacagtggcgatcaactgttgctgggcgagggcatgcgcagcgacgaaccggccgctgaagtgacgcgttggcaactgcatcgggtgctgtcgacttccgcgcggcatggtgatgcgcaggtctgttgcctgacgttcgagcggcctctggactgggtcggtttcggggtgtggctgtcgatgctgttaagatgccacggtgaacgaatcctccgtgtcaaaggactgctcaacgtgaacgacaaccaggctcccatcgtgattcatggtgtgcagcattgtctgcatgcgccggtgcatcttgcagcctggccaggagaggatcgtacttcccggctggtgttcatcctgcgcggtcttgatcccgagttgctgcgtcattcattcgaagtgttttccagcagcttcgcgccctcactcagcgagtctgcggcatga

SEQ ID NO: 8154 - protein, 335 aa, Pseudomonas syringae pv. phaseolicola 1448A
MSIALNVITGFLGSGKTTLLKRLLADEDMGETALLINEFGDVGIDHLLVEEVAPDTVLLPSGCVCCTVRGELKDALLGLLERRNRGEIPAFRRVILETTGLADPAPILTTLSNDPQLRGRFHIGLIVTLVDACHAKLQERLHPEWLAQIAASDRLLLSKTDLVDQPALDALRQHLQALNFSAPLRDTAQIHSGDQLLLGEGMRSDEPAAEVTRWQLHRVLSTSARHGDAQVCCLTFERPLDWVGFGVWLSMLLRCHGERILRVKGLLNVNDNQAPIVIHGVQHCLHAPVHLAAWPGEDRTSRLVFILRGLDPELLRHSFEVFSSSFAPSLSESAA

SEQ ID NO: 8155 - DNA, 978 bp, Pseudomonas syringae pv. phaseolicola 1448A
  CDS (1)..(978): transl_table=11
atgactgagttgcaacccatccccgtgaccgtgctgaccggttttctgggggcaggcaaaaccactttgctgcgccacctgctcaaggccgagcacggcctgaaaatcgccgtgattgaaaacgaattcagcgatgcaggtatcgacagccagttgctcggcactgatcccgtacagatcatgaccctgtccaatggctgcgtgtgctgcaccatccacaccgacctgaccaaggcgctctacctgttgctggagcgcctggacagtggcgaaatcgctttcgaccgactggtgatcgagtgcaccgggctggccgaccctgcacccgtcgcccagaccttcttcatcgatgaagagctgcgcgagcgctatatcctcgacggcatcatcaccctggtcgatgctgcacacgccgatacccacctggcgcaaaccatcgcccaggcgcaaatcggctttgccgaccgattgctggtgagcaagcgtgatctggtcgacgacgcaaccttcgatgccctcagcgcacggctgacccgcatcaaccgccgcgccccgatccgcatcgtcgaacatggcaacatcgaccttgccgaactgctcgatgtgcgcggcttcaacctcaacgccgacctcggcggcggtatgatcctgcgcccactggcccctgtcggcaattcaggcgaccgcatcaccagcctcgtcctgcgcagcgaaaaaccgctaaacctggaccgcctcagcgagttcatgaacgaactgctggaagaccatggcaagcaactgctgcgttacaagggcgtgctcaacatcaaagacgaaccgcgcaagatggtgtttcagggcgtgctcaagctgtacggctttgactgggacaccgagtgggccgaaggcgaaaaacgcgagagcgtgatcgtgttcattgccgatgaattgccggaggagaagatccgggcggggttcgagagggtatgcggctga

SEQ ID NO: 8156 - protein, 325 aa, Pseudomonas syringae pv. phaseolicola 1448A
MTELQPIPVTVLTGFLGAGKTTLLRHLLKAEHGLKIAVIENEFSDAGIDSQLLGTDPVQIMTLSNGCVCCTIHTDLTKALYLLLERLDSGEIAFDRLVIECTGLADPAPVAQTFFIDEELRERYILDGIITLVDAAHADTHLAQTIAQAQIGFADRLLVSKRDLVDDATFDALSARLTRINRRAPIRIVEHGNIDLAELLDVRGFNLNADLGGGMILRPLAPVGNSGDRITSLVLRSEKPLNLDRLSEFMNELLEDHGKQLLRYKGVLNIKDEPRKMVFQGVLKLYGFDWDTEWAEGEKRESVIVFIADELPEEKIRAGFERVCG

SEQ ID NO: 8157 - DNA, 1212 bp, Pseudomonas syringae pv. phaseolicola 1448A
  CDS (1)..(1212): transl_table=11
atggcaaatcttctacccgttaccgttctgtccggttttctaggggccggtaaaagcactttactcaattatgtgctgcgcaatcgtgaaaacctgcgggttgccgtaatagtcaacgatatgagtgagatcaatatcgatggcagcgaagttcagcgcgatgtcagcctgaaccgtgccgaagaaaagctgatcgagatgagcaatggctgcatctgctgcaccttgcgcgaggacttgctcgaagaggtcagtcgtcttgctcaggacggtcgttttgactatttattgatcgaatccactggaatctccgaaccactgccagtggccgagaccttcacttttcgtgacgaagctggcaaaagcctgatggatctggcgcgtctggacaccatggtcaccgtcgtcgatggcgtgaattttctgctcgactacgaagcggcggacggcttgtccacacgcggtgaaagcctgggtgaggacgatgaccgctcgattaccgacctgctgatcgagcagatcgaatttgccgacgtcatcctgctcagcaagatcgacctgattagctccagtgagcgcgaagagctgatggcgatcctgaagcgcctcaaccccgaagccgagattgtgccgatggtgatgggccaggtgccgttggcgacgattctcaacaccgggcgttttgacttccagcgcgcgtctcaggccccgggctggctcaaggaaatgcgcggcgaacacacgccggaaaccgaagagtacggcatagcatcaactgcctatcgtgcccggcgcccgttccatccggagcgttttttcaatttcatcaatcgcccatggaccaatggcaaactgctgcgctccaaaggcttcttctggctggccagcaaatacaaggatgcaggtagctggtcgcaggcgggcggcttgatgcgccaaggttttgccggacgctggtggcgcttcgtgaaccgtgaaagctggccagaggacagagaaagcgtcaaatccattctggagaactggtcgactgaaaccggtgactgccgtcaggaactggtgttcatcggtcagaacatcgattttgaacggctgaccgccgagctggataactgcctgctcactgatgcggaaatggaggcgggtgtcgagcgctggcgcacgctggccgatccttttggcgactggtacgaagaagaggtggctgcctga

SEQ ID NO: 8158 - protein, 403 aa, Pseudomonas syringae pv. phaseolicola 1448A
MANLLPVTVLSGFLGAGKSTLLNYVLRNRENLRVAVIVNDMSEINIDGSEVQRDVSLNRAEEKLIEMSNGCICCTLREDLLEEVSRLAQDGRFDYLLIESTGISEPLPVAETFTFRDEAGKSLMDLARLDTMVTVVDGVNFLLDYEAADGLSTRGESLGEDDDRSITDLLIEQIEFADVILLSKIDLISSSEREELMAILKRLNPEAEIVPMVMGQVPLATILNTGRFDFQRASQAPGWLKEMRGEHTPETEEYGIASTAYRARRPFHPERFFNFINRPWTNGKLLRSKGFFWLASKYKDAGSWSQAGGLMRQGFAGRWWRFVNRESWPEDRESVKSILENWSTETGDCRQELVFIGQNIDFERLTAELDNCLLTDAEMEAGVERWRTLADPFGDWYEEEVAA

SEQ ID NO: 8159 - DNA, 1095 bp, Prochlorococcus marinus str. NATL2A
  CDS (1)..(1095): transl_table=11
atgagcgctaatcgtctaccagttacggtagttacaggattcttaggttctggtaaaacaactctcttgaggcatcttttacgtgaagggaatcaacgtctagctgtagttgttaatgaatttggaacagttggtttagatggagaccttcttaaaaactgtgggctttgccctgatgatgaagtagatgaaagaatagttgagttaaataatggctgcttatgttgcactgttcaagaggacttccttcctgcaatggaagctttgcttcttagatcaaatcagcttgatggaatcattattgaaaccagtgggcttgctttgccaaagcctttacttcaagctcttaattggccggcaataagaaataaggtttttattaatggagtcgtcactttagttgatggatatgctctctcaaatggaagcccagtaagtgatttaaagagtattaatgaacagatgacaaatgataatagtattgatcacataactccaatagatgagctttttagagatcaattgatctctgctgatcttgtactagttagtaggtctgatttgctttctgcgaaagattttttatttgtcgaagaagaggtaaaaaaacgaggaaattcaaatgctaatgttctgcctatatcaaatggaataattgaaccatcagtcattcttggtctttgtaaagaacaaaataatatttatcgtctagatcaaaataaccaaaaccaaaaccaaaaccaaaaccatgaccatgaccatgaccatgaccatgaccatgaccatgttgatgtaattagtgatcatttaagaatggaaaccccaattgatcaagatgttttgagagagatgtttttgagacttgtcccggaatatcaaattcttcgagtaaaaggtaaatgctggattgaaggcaaagccttgcctcttcagatccaaatggttggcccacgatttaattcatggtttgaggcggctaatgaaaacgcttggcaacctcgtcagtcaggtattgatattgtctttttgagtttgagagagggagttaaagaagctgttgtaaattctttatgcataagcactcgtataaagtaa

SEQ ID NO: 8160 - protein, 364 aa, Prochlorococcus marinus str. NATL2A
MSANRLPVTVVTGFLGSGKTTLLRHLLREGNQRLAVVVNEFGTVGLDGDLLKNCGLCPDDEVDERIVELNNGCLCCTVQEDFLPAMEALLLRSNQLDGIIIETSGLALPKPLLQALNWPAIRNKVFINGVVTLVDGYALSNGSPVSDLKSINEQMTNDNSIDHITPIDELFRDQLISADLVLVSRSDLLSAKDFLFVEEEVKKRGNSNANVLPISNGIIEPSVILGLCKEQNNIYRLDQNNQNQNQNQNHDHDHDHDHDHDHVDVISDHLRMETPIDQDVLREMFLRLVPEYQILRVKGKCWIEGKALPLQIQMVGPRFNSWFEAANENAWQPRQSGIDIVFLSLREGVKEAVVNSLCISTRIK

SEQ ID NO: 8161 - DNA, 1383 bp, Prochlorococcus marinus str. NATL2A
  CDS (1)..(1383): transl_table=11
atgagcaacacgcaaaaagtaccggttacaatattgactggttttctaggatctggcaaaacaaccctactcaatcgaatcctgagcgaagagcacggtaaaaaaatagctgttattgagaatgaatatggtgaagttggcattgatcaaggattagtcatcaatgctgatgaagaggtcttcgagatgtccaatggttgcatttgctgcaccgttcgtggtgatcttattcgtgtacttggaaacctcatgaagaggcgagacaaatttgactatgtattagttgaaactactggccttgctgatcctggtcctgttgctcagacattctttatggacgatgaaatccgtgaggagttttcacttgatggaatagtcacacttgttgatgcagcccatatagagcaacaacttggtcgaagtgatgagagttcggagcaagttgcctttgctgacgtccttgtcctaaataaaaccgatctagtttcagatgaatcactcgacaacttagaatcacggctacgcgatatgaatcgtatggctcgtgtcatacgtagtaaacaagcagacgtctcaattgatactgtgctaaatctaagtgcttttgatctagatcaagtacttcagcgtcgtccaacttttcttgaaccagaatacccatttgagtggacaggtgttttttcacttgaaaaaggtcgctatgaacttacgctcgaagaaggtccagaccccacaatgtctctcgtccagttattagaccaaggtaaagacgagacagctcttaacacaggtgctgaatcatgcgtgagactctacgcagaacaagaacaacttatgaatccaggggatttggttccagtcggcaagcatgtgaaccttcaacttcaatccgaagggactaagtccttcttcatagatgttgataaggcaagggatataggtctattcacgcaacatacagccgaagaatttaatatgaaattaacgaaagtaaatactccttctacagacgagatagataatgatcagaacatctctacaatttctccaatagctgagagggtttgggtagctgaacacgaacacgatgacgaagtaggttcattcgctatcgagcgagagggtgatgtcgatccggagaaactcaatagatggctaagtcgacttttgtctgagaaaggtgtagatatatttcgcactaaaggtttcattagttatgcgggtgaatctaagcgaatagtttttcaaggagtacacatgctcttcacagcacaacctgataaagaatggggcaatgaacctcgccgtaaccaactcgtctttatcggtagaaatcttgatgaagcagaaatgatcaaggagtttgataaatgtctggtatag

SEQ ID NO: 8162 - protein, 460 aa, Prochlorococcus marinus str. NATL2A
MSNTQKVPVTILTGFLGSGKTTLLNRILSEEHGKKIAVIENEYGEVGIDQGLVINADEEVFEMSNGCICCTVRGDLIRVLGNLMKRRDKFDYVLVETTGLADPGPVAQTFFMDDEIREEFSLDGIVTLVDAAHIEQQLGRSDESSEQVAFADVLVLNKTDLVSDESLDNLESRLRDMNRMARVIRSKQADVSIDTVLNLSAFDLDQVLQRRPTFLEPEYPFEWTGVFSLEKGRYELTLEEGPDPTMSLVQLLDQGKDETALNTGAESCVRLYAEQEQLMNPGDLVPVGKHVNLQLQSEGTKSFFIDVDKARDIGLFTQHTAEEFNMKLTKVNTPSTDEIDNDQNISTISPIAERVWVAEHEHDDEVGSFAIEREGDVDPEKLNRWLSRLLSEKGVDIFRTKGFISYAGESKRIVFQGVHMLFTAQPDKEWGNEPRRNQLVFIGRNLDEAEMIKEFDKCLV

SEQ ID NO: 8163 - DNA, 1035 bp, Prochlorococcus marinus str. NATL2A
  CDS (1)..(1035): transl_table=11
atgaacgctagcgtatctaatcttaataaaaatatggtttccaaaaaaaatatccctattacaattatatcaggttttttaggctcagggaaaacaactttattaaatcatatacttactaatcagcaaggtataaagacagctgtattagttaacgagtttggtgaaataggaattgataatgagttaataattaagactgaagaagaaatgatagaactaagtaatggatgtatatgttgctctataaatggtgagttagtagaagcaatagaaaagttaatcaatgtcaacaagaagttagactatattataattgaaactacaggattagcagatcctcttccagttgcgatgacattacttggaagtgatttaagagatcaaacaagattagactcaattataactctaattgatgctgagaactttaatgatgttgctttagaaagttcaataggaagatcacaggtaatctatggtgatattttacttctaaataaatgtgatttagtaactaataaaaatatagaagaaaccatagacaagttaaaagaaataaaaaatgatgtgagaattttaaaaagcattaaaggaaatattcctcttaatctattattaagtgtgggtctatttgaaactgatctaattaatcaaaaagaatcagttcatgatcactctcatgaacataaacatggacatggacatggacatggacatggacatggacactcagaagaagataatagaattgaagactttctttctgtttcttttcaaactaaagaacctttctctcttagaaaattccaatattttctagataatcaattaaaaagcgatgttttcagagcaaagggtattctttggttcagcgaaagcgaaagaagacatgtctttcacctcgctggtaaaagaatttctattgaagatagtgaatggggagaagaaagaaataatcaacttgtctttattggtaaagaattagataaaacaaaaatactgtctcaattaaatgcatgtattgacaaataa

SEQ ID NO: 8164 - protein, 344 aa, Prochlorococcus marinus str. NATL2A
MNASVSNLNKNMVSKKNIPITIISGFLGSGKTTLLNHILTNQQGIKTAVLVNEFGEIGIDNELIIKTEEEMIELSNGCICCSINGELVEAIEKLINVNKKLDYIIIETTGLADPLPVAMTLLGSDLRDQTRLDSIITLIDAENFNDVALESSIGRSQVIYGDILLLNKCDLVTNKNIEETIDKLKEIKNDVRILKSIKGNIPLNLLLSVGLFETDLINQKESVHDHSHEHKHGHGHGHGHGHGHSEEDNRIEDFLSVSFQTKEPFSLRKFQYFLDNQLKSDVFRAKGILWFSESERRHVFHLAGKRISIEDSEWGEERNNQLVFIGKELDKTKILSQLNACIDK

SEQ ID NO: 8165 - DNA, 1203 bp, Ralstonia eutropha JMP134
  CDS (1)..(1203): transl_table=11
atggccgatcgcctgcccatcaccgtgctgtccggatataccggtgccggcaagaccaccttgctgcagcacgtccttgctgcgacagtcggcaagcgcgtgggcgtggctggcagcctccagcaggccggcgagctcgccgtccgtggcggcttcgaccatctgctgctcgagcccgcaggcacggacgacccgatggcaatcgccgaggccgtgctgttcgaggatgaacatggtggcagggccacgctgagtctcgacacgctggtgacggttgtcgatgcatcgacgttcctgcgcgacgtcaacgatgccgagttcctgcacggcagcgacgatgtgcacgacaacgggatcgaggaagacgaccgcaccgtggtcgacgtgctgatcgcccaagtcgagttcgccgacgtgatcgtgcttaacaagtcggatctcgtcgacgcgagcgcgctggcgcagctggaggcgatccttcgcgcgctcaacccgcgtgcggacattgtcgcggcgagcttcggcaagattgctgccgaacgcgtgctcggcaccggccggttcgacttcgaagacaccgcaagcgccacgggctggctggccctgcagcgtggcgagacgctgcccgaagcacacggcatcagcggcttcctctaccgccgtcgccgccccttccatcccgcacgctttgccgagctgatccacaccgagtggatgcgcgagcatggcagcgtgctgcgttccaagggcctgttctggctggcgagccgcatgggcatcgcaggcgactgggcacaggccggaggcgtatgccgtcccgctgcggctggtgcgtggtgggcagctctcgatgcttccgaatggccgactgatgcagcagacctcgcagcgcttgaagccgacatgctggacgaaggacagcctgccgcctacggcgaccgccgccaggaaatcgcgctgatcggcgcagacctcgatcgctccgcactggaggcttgtctcgatgcctgcctgctgaccgatgccgagatggcggccgggcccgaagcctgggccgcgtatgccgatccgttcccggcatgggaagacgccttcgacgacgaagatcacgatcacgatcacgatcacgatcatggtcgccaccatggccatgaccaccaccacggcggcgactgcgactgtggccatccgcatgatcactga

SEQ ID NO: 8166 - protein, 400 aa, Ralstonia eutropha JMP134
MADRLPITVLSGYTGAGKTTLLQHVLAATVGKRVGVAGSLQQAGELAVRGGFDHLLLEPAGTDDPMAIAEAVLFEDEHGGRATLSLDTLVTVVDASTFLRDVNDAEFLHGSDDVHDNGIEEDDRTVVDVLIAQVEFADVIVLNKSDLVDASALAQLEAILRALNPRADIVAASFGKIAAERVLGTGRFDFEDTASATGWLALQRGETLPEAHGISGFLYRRRRPFHPARFAELIHTEWMREHGSVLRSKGLFWLASRMGIAGDWAQAGGVCRPAAAGAWWAALDASEWPTDAADLAALEADMLDEGQPAAYGDRRQEIALIGADLDRSALEACLDACLLTDAEMAAGPEAWAAYADPFPAWEDAFDDEDHDHDHDHDHGRHHGHDHHHGGDCDCGHPHDH

SEQ ID NO: 8167 - DNA, 1074 bp, Ralstonia eutropha JMP134
  CDS (1)..(1074): transl_table=11
atgtccaaactgatcccggtcacgatcctgaccggcttcctcggcagcggcaagaccacgctgctcaagcgcatcctcaacgagcagcacggcatgaagatcgccgtgatcgagaacgaattcggcgaagagaacatcgacaacgaaatcctggtacaggacggccgcgagcagatcgtgcaaatgagcaacggctgcatctgctgcacgatccgcggcgacctggtgcaggcgctgtcgacgctgatgacgcggcgcgacgcgggtgagatcgagttcgaccgcgtggtcatcgaaaccaccggcgtggccaatccgggaccggtcgcgcagaccttcttcatggacgacgagatcgcgtcgcgctacctgctggacgcggtgatcacgctggtcgatgccaagcacgcccacctgcagctcgacaagcaggaagaggcgcagcgccaggtcggctttgccgacgcgatcttcatcaccaagtcggacctggtcagcgaggccgaggtggccgaactgcgccaccgcctgctgcacatgaacccgcgcgccccgatccgccaggccaacttcggcgagacgccgatcgacaccatcttcgacctgcgcggcttcaacctgaatgccaagctggagatcgatccggagttcctgagcgccgatgaccacgatcacggtcatggccacgaccatgagcacgagcacgagcacggagagcattgcggcacggagtgcggccatgaccacagccacgaccaccatcatcaccaccaccacaccgaccgcatcgcgtcgttcgtcttccgcagcgacaagccgttccactacggcaagcttgaggaattcctgtcgggcatcctggccgtctatggggaaaaactcttgcgctacaagggcgtactatatatggaaggtgtggaccggaaagtcgtgttccagggagtccaccaactgatgggcagcgacgtcggtgccaagtgggaagaggagacgcctggcaccaagatggtgttcatcggcgtggacctgccccgcgatgccattctgaaggggctgggcaactgcctggcctga

SEQ ID NO: 8168 - protein, 357 aa, Ralstonia eutropha JMP134
MSKLIPVTILTGFLGSGKTTLLKRILNEQHGMKIAVIENEFGEENIDNEILVQDGREQIVQMSNGCICCTIRGDLVQALSTLMTRRDAGEIEFDRVVIETTGVANPGPVAQTFFMDDEIASRYLLDAVITLVDAKHAHLQLDKQEEAQRQVGFADAIFITKSDLVSEAEVAELRHRLLHMNPRAPIRQANFGETPIDTIFDLRGFNLNAKLEIDPEFLSADDHDHGHGHDHEHEHEHGEHCGTECGHDHSHDHHHHHHHTDRIASFVFRSDKPFHYGKLEEFLSGILAVYGEKLLRYKGVLYMEGVDRKVVFQGVHQLMGSDVGAKWEEETPGTKMVFIGVDLPRDAILKGLGNCLA

SEQ ID NO: 8169 - DNA, 1083 bp, Ralstonia eutropha JMP134
  CDS (1)..(1083): transl_table=11
atgacgcaccacgccacgcagttgccgcccgtaccggtcaccatcctcaccggcttccttggctccggcaagaccacgctgctgaaccacatcctgacgcagaagcacgggcaccgcatcgcggtgatcgagaacgagttcggcgaggtcgatgtcgactccgatctcgtgatgacttccgacgaagagatctaccagatgaccaacggctgcatctgctgcgttgtggacgtgcgcacggacctcgtgcgcatcctgcagaagctgctcgagcggcccgagcgattcgaccacatcctcgtggagaccagcggcctggccgacccgacgccagtggccgcgaccttcttcatggaccatgaagttgcgcagcaggtaagactcgatggcattctgacgctcgtggatgcggtgcacatcgaagatcacctcgatgatccgcaactgacagggttcgacaaccaggccgtggaccagattgtcgcggcggaccgcgtcatcctgaacaagaccgatctcgtcagtgccgcgcggctcgacgcactcgaagcgcgcatccacaagctcaatgaaggcgcgcagatcctgcgctccaactatgcgcaggtcgatctaggcaagatcctcggcatcggcgggttcacgccgggcatagtgcagatggaggatcacggacatgcgcatcacgagcacgatcatgctggccacgtctgcgacgagcattgcgaccatgcgcatgatgaggccgagcatggtcatcgtcatgatccatcggtgacatcggtctcgctggtgttcgaccagccattcgatcgccagcggcttgaatacggcttgcgggcattgctcgccgcacagggcgacgatgtattccgcatgaaaggcatcgtcgccgtggccggcgatacgcagcgctacgtgttgcaggccgtgcaccggctcatggatttccgtgcggacgcgccatggggcacggaagcgccgcagagcaagttcgtgttcatcggccgcaacctggacaagcagcggctgcagacactgctgaacgtttgcatgccggtgcgcgtagcagaagcggcgtaa

SEQ ID NO: 8170 - protein, 360 aa, Ralstonia eutropha JMP134
MTHHATQLPPVPVTILTGFLGSGKTTLLNHILTQKHGHRIAVIENEFGEVDVDSDLVMTSDEEIYQMTNGCICCVVDVRTDLVRILQKLLERPERFDHILVETSGLADPTPVAATFFMDHEVAQQVRLDGILTLVDAVHIEDHLDDPQLTGFDNQAVDQIVAADRVILNKTDLVSAARLDALEARIHKLNEGAQILRSNYAQVDLGKILGIGGFTPGIVQMEDHGHAHHEHDHAGHVCDEHCDHAHDEAEHGHRHDPSVTSVSLVFDQPFDRQRLEYGLRALLAAQGDDVFRMKGIVAVAGDTQRYVLQAVHRLMDFRADAPWGTEAPQSKFVFIGRNLDKQRLQTLLNVCMPVRVAEAA

SEQ ID NO: 8171 - DNA, 1011 bp, Ralstonia eutropha JMP134
  CDS (1)..(1011): transl_table=11
atgattgaacagtgcgaattcacggtgttgtcaggcttcctcggtagtggcaagaccacgcttctatccacgtacctcgcctgctccgacgtaagccgtgtcgccgtcatcgtcaacgatgtcggcgaagtgaatatcgacggcgccgtcctcgcgctgcaggatgggattcccatggcaaccctgagcaacggctgcgtctgctgcagcctgaccaacgatttgccttacacgatcgatgcattggttcgcgagcgacgcctgtctgggctgccaccctacacacggatcatcctcgagtgcagcggcctgtccgatcccggcggggtgatgcgcagtctcagcgcacttgcgagccttggcatgcgtgtccgggtagtgaccatctacgcatgcgaccggcatgtcgcacccgaggacttttccttgctcgcgcagcaggtaagcgcagcgcatacgatcgtgctgacgcgcactgaccttgtcagtacccagcaaatcgtcgacgtggcaaccgaagcaaagtccctggggccgatgggcaggatcgttgtggaaaccgcgccggaggtccgggcccgcgcagcgtttgatgcgcccgcggcgccgccgaccagcgacccgggccatgcgccgggctggcagtatgaatcgcggcatccgcgcatcaacgtgttctcattgcaatgggattgcgacctgccctgggaccacgtcgccgcgtggctggagaacctggcattctacttcgacagccgcctgctgcgaaccaaaggcttagtcaggttggacagtggcgatgtattgctcatccagggcgtcgggcagcatttcgacacaccccggaagctgaaccagcttgctgtggaaggctccagccttgtcgtgatctgcagggatgcttcggtgagcgaaatcgtcgagctcgctccccagattcctggcatgaccgtgtccgcgcgcaccgccggcagcaaagccatcaggctggctcggcccggatacgactga

SEQ ID NO: 8172 - protein, 336 aa, Ralstonia eutropha JMP134
MIEQCEFTVLSGFLGSGKTTLLSTYLACSDVSRVAVIVNDVGEVNIDGAVLALQDGIPMATLSNGCVCCSLTNDLPYTIDALVRERRLSGLPPYTRIILECSGLSDPGGVMRSLSALASLGMRVRVVTIYACDRHVAPEDFSLLAQQVSAAHTIVLTRTDLVSTQQIVDVATEAKSLGPMGRIVVETAPEVRARAAFDAPAAPPTSDPGHAPGWQYESRHPRINVFSLQWDCDLPWDHVAAWLENLAFYFDSRLLRTKGLVRLDSGDVLLIQGVGQHFDTPRKLNQLAVEGSSLVVICRDASVSEIVELAPQIPGMTVSARTAGSKAIRLARPGYD

SEQ ID NO: 8173 - DNA, 927 bp, Staphylococcus saprophyticus subsp. saprophyticus ATCC 15305
  CDS (1)..(927): transl_table=11
atgaaaaatattaaacaacctaagacgcctattacaattgtaacaggttttttaggtagtgggaaaacaactttccttagcaattatgtgaaatatttattaagaaaaaatgaaaacccaagtatcatcgtaaatgaatacggcaatttagatgtagatagcgctgcattaagcgacgatgttgaagtcgcatcgatattaaatggttgcgtctgttgtgacttgcaacaagatttaataaaacaattaaaacattttcttaacaaaagtgcaatgcaccatattataattgaggcgacgggtattgcacatccgatagaaattattgcggcatgccaagatcctgaaattgtcgctaatgtccaaacgcctatggtaataggattattagacgcaccaagatttttgaccagaacccaatatacccatagtacaaaacaattgatggaagaacaattagaagtaagtcatgcaattgtagtcaataaaatggatttattaaaaagtgatgcgtatgatgatcttaaagctattgataaaattaattcagaagcgcccaaattttatacaacttatgcagatatgcacatggatgcttttgatacgattacaaatacatcattgccaactaaagaaagccatatgcatcatcatggtataaatagtgtacaataccatttttctgggccgattgatcgtcaattattttatcaatttattttacggctcccagataatgttctaagattaaagggatatgttaaatttcgtgatatgcctcatgaaacttatgaatttcaatatgcatttggtctcccagattatcaaattattgatgatgaaatgccattaacgattgtgatgattggtgaacagattgatgaaaatcaaatacgcaacaaattagacatgttacagttcacttaa

SEQ ID NO: 8174 - protein, 308 aa, Staphylococcus saprophyticus subsp. saprophyticus ATCC 15305
MKNIKQPKTPITIVTGFLGSGKTTFLSNYVKYLLRKNENPSIIVNEYGNLDVDSAALSDDVEVASILNGCVCCDLQQDLIKQLKHFLNKSAMHHIIIEATGIAHPIEIIAACQDPEIVANVQTPMVIGLLDAPRFLTRTQYTHSTKQLMEEQLEVSHAIVVNKMDLLKSDAYDDLKAIDKINSEAPKFYTTYADMHMDAFDTITNTSLPTKESHMHHHGINSVQYHFSGPIDRQLFYQFILRLPDNVLRLKGYVKFRDMPHETYEFQYAFGLPDYQIIDDEMPLTIVMIGEQIDENQIRNKLDMLQFT

SEQ ID NO: 8175 - DNA, 1287 bp, Methanosarcina barkeri str. fusaro
  CDS (1)..(1287): transl_table=11
ttgagattaaaagcaaatagggaaaaaataagcaataagcaagaagatacgaagggaggaaaaaacgtgcaggtcattgtagtgggaggatttctgggaagcggaaaaaccaccactattatcaatatgggcaaatacctggcagagaaagggaaaaaagttgccattatagtgaacgagatcggggaagtcggaattgatggggatgtgataaaaaagttcgggttcgatacgaaagagatcacaagtgggtgcatctgctgttctctgaaagtaggattaagggtaacagttactcatcttgcaaatgaatacaagcctgacatccttatgatcgaacccacaggcatcgccttcccgaatctaataaagaaagaaattgaacttatgaaccttggtgagcaggtaaaaatcgctcctcttgtgaccctgattgacggcagccgtttcaagtacctgatgaaagaagtaaaggaatttgccatgaggcagattatcgatgcggaaattctcgggataaataagatagacctgatagaacctattcgaattccaatccttgaagcctcggtccagcaactgaatccgaagtccagggtagtcctgctttcaggaaaagacacaggtgaaagctttgagaattttatgcgattagtgcttcctgatcttgaagaactatccaaagaagtcccgactgagataacagaagaagtaaaaccttctaaagctgaaccttctgcacctcaggagacagaaaattcaattgaagcctcaaaagtaggcagttattctgtagagtttgcggttgaaaatggaaacctgagtactgaggtttccagggaattaacaaccgaactgatgaacacaataaaagcaaaggtgctgcaactaaatcccgagtttatagggcacatcaagcttttcttggacaatgggtcagaaaccgtgaaacagaacattacaatatattatgaagagccccaggaagatgtgatcaaatcaaaggaaggagctacccctaccctcaagatactttcagcggtttcaaacgttgataaagaagctgttaaagctgctgtaaatgattcggtacatgaggtctttgagagaaaacaaataaaagtaaacaaaatcgagcatgaacataaccacgaacatgagcaccatgaacatgagcaccatgaacatgagcaccatgaacatgagcaccatgaacatgaacaccatgaacatgaacaccatgaaaagcataagcatggtgatcaggaagaagaaattagtgagtga

SEQ ID NO: 8176 - protein, 428 aa, Methanosarcina barkeri str. fusaro
MRLKANREKISNKQEDTKGGKNVQVIVVGGFLGSGKTTTIINMGKYLAEKGKKVAIIVNEIGEVGIDGDVIKKFGFDTKEITSGCICCSLKVGLRVTVTHLANEYKPDILMIEPTGIAFPNLIKKEIELMNLGEQVKIAPLVTLIDGSRFKYLMKEVKEFAMRQIIDAEILGINKIDLIEPIRIPILEASVQQLNPKSRVVLLSGKDTGESFENFMRLVLPDLEELSKEVPTEITEEVKPSKAEPSAPQETENSIEASKVGSYSVEFAVENGNLSTEVSRELTTELMNTIKAKVLQLNPEFIGHIKLFLDNGSETVKQNITIYYEEPQEDVIKSKEGATPTLKILSAVSNVDKEAVKAAVNDSVHEVFERKQIKVNKIEHEHNHEHEHHEHEHHEHEHHEHEHHEHEHHEHEHHEKHKHGDQEEEISE

SEQ ID NO: 8177 - DNA, 987 bp, Shigella sonnei Ss046
  CDS (1)..(987): transl_table=11
gtgaccaggaccaacctcatcaccggttttctcggcagcgggaaaaccacgtcgattcttcatctgttagcccataaagatcccaacgaaaaatgggcggtactggttaatgaatttggggaagtcggaattgatggtgctttgctcgccgatagcggcgcattgctgaaagagatccccggcggctgcatgtgctgcgttaatggtttacccatgcaggtagggttgaataccttactgcgtcagggaaaaccagaccgcttgttgatagagccgaccgggctgggccatccgaaacagatcctcgatctgttaaccgcaccagtctatgaactgtggatagatctgcgcgccaccttgtgcattctcgatccacgcctgctgctggacgaaaaaagcgccagcaatgaaaacttccgtgaccagctggctgccgcagacatcattgtcgccaataaatccgaccgtgcgacgcccgaaagtgagcaagcgctacagcgttggtggcagcaaaatggtggcgatcgacaattaattcacagtgagcatgggaaagttgacggtcatcttctggatttgccgcgtcgcaatttagccgagttgcccgccagcgccgcgcattctcatcagcatgtcgtgaaaaaagggttagcagcgttaagcctgccagagcatcaacgctggcgtcgcagtctgaacagcgggcaaggatatcaggcctgcggctggatattcgacgctgatacggtattcgacaccattggcattctggaatgggcgcgacttgcaccggtggaacgcgtcaaaggcgtgctgcgtattcccgaagggctggtacgaatcaaccgtcagggcgatgacctgcacattgaaacgcaaaacgttgcgccaccggacagccgtattgagctgatttccagcagcgaagctgactggaatgctttgcagagcgcgctgttgaagcttcgtttagcgactaccgcgtaa

SEQ ID NO: 8178 - protein, 328 aa, Shigella sonnei Ss046
MTRTNLITGFLGSGKTTSILHLLAHKDPNEKWAVLVNEFGEVGIDGALLADSGALLKEIPGGCMCCVNGLPMQVGLNTLLRQGKPDRLLIEPTGLGHPKQILDLLTAPVYELWIDLRATLCILDPRLLLDEKSASNENFRDQLAAADIIVANKSDRATPESEQALQRWWQQNGGDRQLIHSEHGKVDGHLLDLPRRNLAELPASAAHSHQHVVKKGLAALSLPEHQRWRRSLNSGQGYQACGWIFDADTVFDTIGILEWARLAPVERVKGVLRIPEGLVRINRQGDDLHIETQNVAPPDSRIELISSSEADWNALQSALLKLRLATTA

SEQ ID NO: 8179 - DNA, 855 bp, Shigella sonnei Ss046
  CDS (1)..(855): transl_table=11
gtgattgaaaacgaattcggcgaagtctccgttgatgatcaactgattggcgaccgcgccacgcagatcaaaacgctgaccaacggctgcatctgctgttcgcgctccaacgagctggaagacgcactactcgacctgctggataatctcgacaagggcaatattcagttcgaccgtctggtcattgaatgcaccggcatggccgatcccggcccgattattcagaccttcttctcccatgagattttatgccagcgctacctgctggacggggtgattgcgctggtggatgcggtacatgccgatgagcagatgaaccagttcaccatcgcccagtcccaggttggctacgccgaccgtattctgctgacgaaaaccgacgtcgcaggcgaagcagagaaactgcgtgaacgcctggcgcgcatcaacgcccgcgcaccggtctacaccgttacccacggcgatatcgacctgggccttctgttcaacaccaacggttttatgctggaagaaaacgtcgtcagcaccaaaccgcgtttccactttatcgcggacaaacaaaacgatatttcgtcgattgtggtggaactggattacccggtagatatcagcgaagtttcccgggtgatggaaaacctgctgctggaatcggcggataaactgctgcgttacaaagggatgctgtggattgacggcgaacctaaccgcctgctgttccagggcgtccagcgcctctacagcgccgactgggaccgcccgtggggcgatgaaaaaccgcatagcacgatggtgtttatcgggattcagttgccggaggatgagattcgggcggcgtttgcgggactcaaaaagtaa

SEQ ID NO: 8180 - protein, 284 aa, Shigella sonnei Ss046
MIENEFGEVSVDDQLIGDRATQIKTLTNGCICCSRSNELEDALLDLLDNLDKGNIQFDRLVIECTGMADPGPIIQTFFSHEILCQRYLLDGVIALVDAVHADEQMNQFTIAQSQVGYADRILLTKTDVAGEAEKLRERLARINARAPVYTVTHGDIDLGLLFNTNGFMLEENVVSTKPRFHFIADKQNDISSIVVELDYPVDISEVSRVMENLLLESADKLLRYKGMLWIDGEPNRLLFQGVQRLYSADWDRPWGDEKPHSTMVFIGIQLPEDEIRAAFAGLKK

SEQ ID NO: 8181 - DNA, 1050 bp, Thiobacillus denitrificans ATCC 25259
  CDS (1)..(1050): transl_table=11
gtgatcccgccagaacccattcccgtcaccctgctcaccggtttcctcggcagcggcaagaccacggtgctcaaccagatcgtgcgccagctgccgcgcacggcgatcctgatgaacgagttcggcgaagtcgcactcgaccaccaactgctgcaggagatggaggggccgctggccctgctatccggcggctgcgtctgctgcacgatctcgggcagcctgtcgccgacgctgaagaatctctggatggcgcgcgaccgcggcgacatcccggccttcgagcgggtcgtcatcgagacgaccggcatcgccgacccggtgccggtgctcgacaacctgctgcacgacaactgggtgcgcgcgcgctttcgcctcgacggcgtcgtcgccacggtcgacgcgctggtcggcatgggccagctcgacgaacacgccgaggcggtcaagcaggtcgcggtcgccgaccggctgctgctgaccaaaaccgacctcgcgccggccgcgacgaccgccgcgctccgcgaaaggctggcggcgctcaacccggcggccgacatcctgacggtgacgcacggcgcgctcgatccggcggcgatccagaacctcggcttgtggaacgccgcgacgcgaacgctcgaagtcgcacgctggctgaagcccgagcgctaccggcaggccgtcgccgggcgactcggcggcaagccgcggacggcactgcacgacagtcggatcgaggcgttttcggtgctgatcgacacgccgctcgatcgctacggcctgcagtcggcgctgtcgatgctgaccgcatttcgcgccgagaatctgctccgcttcaaggcgatcgtgaacctcaagggcgaagcgctgccggtcgtgctccacggcgtccagcacgtgctctatccggaagtccagctcgacgcctggcccgacgacgaccgccgcagccgcttcgtcttcatcgtgcgcgatctcgaaccgcagttcgtcgccaagctgttggccgatttctccggtgccgcccggattccggaccctgcgacgccgtga

SEQ ID NO: 8182 - protein, 349 aa, Thiobacillus denitrificans ATCC 25259
MIPPEPIPVTLLTGFLGSGKTTVLNQIVRQLPRTAILMNEFGEVALDHQLLQEMEGPLALLSGGCVCCTISGSLSPTLKNLWMARDRGDIPAFERVVIETTGIADPVPVLDNLLHDNWVRARFRLDGVVATVDALVGMGQLDEHAEAVKQVAVADRLLLTKTDLAPAATTAALRERLAALNPAADILTVTHGALDPAAIQNLGLWNAATRTLEVARWLKPERYRQAVAGRLGGKPRTALHDSRIEAFSVLIDTPLDRYGLQSALSMLTAFRAENLLRFKAIVNLKGEALPVVLHGVQHVLYPEVQLDAWPDDDRRSRFVFIVRDLEPQFVAKLLADFSGAARIPDPATP

SEQ ID NO: 8183 - DNA, 1047 bp, Rhodobacter capsulatus
  CDS (1)..(1047): transl_table=11
atgtccgatctgaccaaaatccccgtcaccgtgatcaccggctttctgggcgcgggcaagaccacgctcatccgccatctgatggccaatcccgagggccgcaagctcgccgttctggtcaatgaattcggcaccgtcggcgtcgatggcgagatcttgcgccaatgcgccgatgaaaactgccccgatgaaaacatcgtcgaactggcgaatggctgcatctgctgcaccgtcgccgatgaattcatcccgacgatcgaggcgctgatggcccggcccgtccgccccgatcacatcctgatcgagacctcggggctggctttgccgaagccgcttctgaaggccttcgactggcccgcgatccgctcgaagatcacggtggacggggtgattgctgtggccgatgccgaggccgtcgccgcgggccgctttgcccccgatgtcgccgccgtcgatgcccagcgtcaggccgatgacatcatcgaccatgaaacgcccctttccgaggtcttcgaggatcagatcgcctgcgccgatatcgtgcttttgtcgaaagctgatctggccggggccgagggtctggccacggcccgcgcgctgatcgaggcggaactgccgcgcaagctgccgatcctgccgctgaccgaaggcgtgatcgatccgaaggtgatcctgggccttggcgccgccgccgaggatgatctggctgcccggcccagccatcacgacgatcacgacgatcacgagcatgacgatttcgacacggtggtgatcgaactcccggaaatcgccgatccggcggcgctggtggccgcgatcgaacggctggcgcgcgagcagaacatcctgcgcgtcaaggggcacatcgccgttgcgggcaagccgatgcggcttttggtgcaggccgtgggggaacgcgtgcggcatcaatatgaccggccctggggcacggaggcccgccgctcggcgctggtggtgatcgcggaacatcacgatgtcgacgaggcggcgatccgcgccgtgctgctgggtggggtcgccgcctga

SEQ ID NO: 8184 - protein, 348 aa, Rhodobacter capsulatus
MSDLTKIPVTVITGFLGAGKTTLIRHLMANPEGRKLAVLVNEFGTVGVDGEILRQCADENCPDENIVELANGCICCTVADEFIPTIEALMARPVRPDHILIETSGLALPKPLLKAFDWPAIRSKITVDGVIAVADAEAVAAGRFAPDVAAVDAQRQADDIIDHETPLSEVFEDQIACADIVLLSKADLAGAEGLATARALIEAELPRKLPILPLTEGVIDPKVILGLGAAAEDDLAARPSHHDDHDDHEHDDFDTVVIELPEIADPAALVAAIERLAREQNILRVKGHIAVAGKPMRLLVQAVGERVRHQYDRPWGTEARRSALVVIAEHHDVDEAAIRAVLLGGVAA

SEQ ID NO: 8185 - DNA, 1053 bp, Nitrobacter winogradskyi Nb
  CDS (1)..(1053): transl_table=11
atgtctgatgtaaacgcctccgcctcgacgaaaatccccgtaaccgtgctgacaggctatctcggcgccggcaagaccacgcttttgaaccgcatcctgtcggaaaatcacggcaagaagtatgccgtgatcgtcaacgaattcggcgaggtcggcatcgacaacgacctgatcatcggcgccgacgaggaagtgttcgaaatgaacaacggctgcgtgtgctgcacagtgcgcggcgacctggtgcgtattctcgaaggactgatgaagcgcaagggcaagttcgacgccatcatcgtggagaccacgggcctagccgatccggccccggtggcgcagacgttcttcgtcgacgaggatgtgcagaacaatgcgcgcctcgatgcggtggtgacggtggccgacgccaagtggctgagcgagcggctgaaggatgcgcccgaggcgaagaaccagatcgccttcgccgacgtcatcgtcctgaacaagaccgatctggtgtcgcagcccgaactggccgaggtggaagcgcggattcgcggcatcaatccctacgcgaaactgcaccgcaccgagcgctgccaggtggcgctctcggatgttctggaacgcggcgcgttcgatctcgaccgcatcctcgagatcgagccggatttcctcgagaatgacggccacgatcatgaccaccacgatcatcacggtcacgatcatcacgaccatgatcatggccacggcccgaagcactatcacgatgaggagatgcagtcgctgtcgctgcgttcggacaagccgctcgatcaggaaaagttcatgccgtggctgcaggagcttctggcggcggagggacagaagattctgcgctcgaagggactcatggcgttcagcggcgatgacgatcgctacgtgtttcagggcgttcatatgatgctggagggcagccgccagcgtgcatggaagcctgacgagaagcgggaaagccgtctcgtcttcattggccgcgaattgccggaagccttgatccgcgaaggcttccagaactgcatcgccgcgtga

SEQ ID NO: 8186 - protein, 350 aa, Nitrobacter winogradskyi Nb
MSDVNASASTKIPVTVLTGYLGAGKTTLLNRILSENHGKKYAVIVNEFGEVGIDNDLIIGADEEVFEMNNGCVCCTVRGDLVRILEGLMKRKGKFDAIIVETTGLADPAPVAQTFFVDEDVQNNARLDAVVTVADAKWLSERLKDAPEAKNQIAFADVIVLNKTDLVSQPELAEVEARIRGINPYAKLHRTERCQVALSDVLERGAFDLDRILEIEPDFLENDGHDHDHHDHHGHDHHDHDHGHGPKHYHDEEMQSLSLRSDKPLDQEKFMPWLQELLAAEGQKILRSKGLMAFSGDDDRYVFQGVHMMLEGSRQRAWKPDEKRESRLVFIGRELPEALIREGFQNCIAA

SEQ ID NO: 8187 - DNA, 1062 bp, Nitrobacter winogradskyi Nb
  CDS (1)..(1062): transl_table=11
atgactgacaaaatcccggtcaccgtgctgaccggctatcttggcgccggcaagaccacactgctcaaccgaatcctttcggaggagcacggccgaaaatacgccgttatcgtcaatgagttcggagaaatcggcatcgacaacgacctcgtcgtcggcgctgacgaggaagtgttcgaaatgaacaacggttgcatctgctgcaccgtgcgcggtgacctcatgcgcatcctggccgacctgatgaagcggaacggcaagttcgacgccattatcgtcgagaccaccggcctcgccgatccggcgccggtggcgcagacctttttcgtcgatgagaatgttgggaagaagaccaagctcgacgccgtcgtcaccgtgaccgatgccaaatggctgaatgaccggctcaaggacgccccggaagccaagaaccagatcgccttcgccgacgtgatcctgatcaacaagaccgatctggtctcacccgaagagctcagcgaaatcgaggcgcgcatccgcggcatcaatccttacgcgaagctgcacagaacccaacgggcgcagatcgcgctcagcgagattctggaacgcaacgccttcgacctcgaccgcattctcgatatcgaaccggcattcctcgaacgcaaggaccacgatcacgaccatcatcacgatcatggccacgatcaccatcacgaccatgatcatcatgatcatgaccacaagcacgatgaccatcatggcggggtcaagcactaccacgacgaggaaatgcagtcgatttcactcaaaaccgacaagccgctcgacgcggacaaatttttcccgtgggtcgaggatctcgtgcagaaggaaggcccgaacatcctgcgcagcaagggcattctttccttcaaggacgaggatcggcgcttcgtcttccagggcgtgcatatgattctcgacggcgaccatcaacggccctggaaggacgacgaaaagcgtcaaagccgcatcgttttcatcggccgcaatctgccggaacagttgatcaccgaagggttcgagggctgcatcgcctag

SEQ ID NO: 8188 - protein, 353 aa, Nitrobacter winogradskyi Nb
MTDKIPVTVLTGYLGAGKTTLLNRILSEEHGRKYAVIVNEFGEIGIDNDLVVGADEEVFEMNNGCICCTVRGDLMRILADLMKRNGKFDAIIVETTGLADPAPVAQTFFVDENVGKKTKLDAVVTVTDAKWLNDRLKDAPEAKNQIAFADVILINKTDLVSPEELSEIEARIRGINPYAKLHRTQRAQIALSEILERNAFDLDRILDIEPAFLERKDHDHDHHHDHGHDHHHDHDHHDHDHKHDDHHGGVKHYHDEEMQSISLKTDKPLDADKFFPWVEDLVQKEGPNILRSKGILSFKDEDRRFVFQGVHMILDGDHQRPWKDDEKRQSRIVFIGRNLPEQLITEGFEGCIA

SEQ ID NO: 8189 - DNA, 786 bp, Escherichia coli
  CDS (1)..(786): transl_table=11
atgaagaattcttccgcgaacgccagaacgcacgctacggcggcgatggtaaaggcggtatgcgctgttgttaatggagagagcatgaacccgattgcagttaccctactcaccggttttttaggcgcgggcaaaaccaccctgctgcgccatattcttaatgaacaacacggctacaagattgccgtgattgaaaacgaattcggcgaagtctccgttgatgatcaattgattggtgatcgcgcaacgcagatcaaaacgctgaccaacggctgcatctgctgttcgcgctccaacgagctggaggacgcgctactcgacctgctggataatctcgacaagggcaatattcagttcgatcgtctggtcattgaatgcaccggcatggccgatcctggcccgattattcaaacctttttctcccatgagattttatgccagcgctacctgctggacggcgtgattgcgctggtggatgcggtacatgccgatgagcagatgaaccgattcaccatcgcccagtcccaggtggctacgcccgaccgtattctgctgactaaaaccgacgtcgcaggcgaagcagaaaaactgcgtcaacgcctggcgcgcatcaacgcccgtgcaccggtctacaccgtcacccacggcgacatcgacctgggcctgctgttcaacaccaacggttttatgctccaagaaaacgtcgtcagcaccaaaccgcgtttccactttatcgcggataaacaaaacgatatttcgtcgattgtggtggaactggattactag

SEQ ID NO: 8190 - protein, 261 aa, Escherichia coli
MKNSSANARTHATAAMVKAVCAVVNGESMNPIAVTLLTGFLGAGKTTLLRHILNEQHGYKIAVIENEFGEVSVDDQLIGDRATQIKTLTNGCICCSRSNELEDALLDLLDNLDKGNIQFDRLVIECTGMADPGPIIQTFFSHEILCQRYLLDGVIALVDAVHADEQMNRFTIAQSQVATPDRILLTKTDVAGEAEKLRQRLARINARAPVYTVTHGDIDLGLLFNTNGFMLQENVVSTKPRFHFIADKQNDISSIVVELDY

SEQ ID NO: 8191 - DNA, 1035 bp, Leishmania major
  CDS (1)..(1035)
atgagtagcgatgatgaatgcccggagctgatctcggcccgcgtgccggtgaccgttctcacagggtttctcggcagcggcaagacgacgctgttgcactacatcctgtcggcggatcatgacatgcgcattgccgtcattgtgaacgagttcgagttcggcaaaaccatcgagaagggtctgacgctcaagagctccgagaaaccggacgatgagtggctggagctgaacaacgggtgcatgtgttgcaccgcccagacgcagacggtgaaggccctcgagtcgctaatggagcacagaggcacgttcgatttaattcttgtggagacgtccgggcttgcggatcctgggccgatcgcggcgatgttctggcaggatttgccgctctgcggccacctttacctgtctggcatcgtgaccctggttgacgcggtaaacatttgcaggtacctggacgacgaagacgtgatgcgggaagcggagcggcagattctgatggcggacaaggtggtgctcaacaaatgcgacattgccactgaagcccagcaaaaagcggctctcgcagcggtgcgggagatcaaccctgtggccaccgtcatcccgagtgatcactcgcgcgtgcccaaccttcgagacattctgtttattgacaccacccgcgcggcaaccgagctggtgcatcttcacgaacaccatcactcctccatcagtgcggtgtcgcttgagttctttgaagcagagcgcgccttcgccgtcagctcgtaccgcgacgtgcacgccatcggcagtgacctcctctaccgttgcggggattacggcttcgaggtagtgcggtgcaaggctgcgatatggtgctgcgaggatgggcaatacagactcctgcaactccaaagcattggtgacctctttgacgtgacgccaatggtggggcagagtgtgccattcggctgcacacgcgcgttggtgctcggcaagcaactagacgaggtgaagctacgggacatctttgccaagtatctgaaggcgaccaagtag

SEQ ID NO: 8192 - protein, 344 aa, Leishmania major
MSSDDECPELISARVPVTVLTGFLGSGKTTLLHYILSADHDMRIAVIVNEFEFGKTIEKGLTLKSSEKPDDEWLELNNGCMCCTAQTQTVKALESLMEHRGTFDLILVETSGLADPGPIAAMFWQDLPLCGHLYLSGIVTLVDAVNICRYLDDEDVMREAERQILMADKVVLNKCDIATEAQQKAALAAVREINPVATVIPSDHSRVPNLRDILFIDTTRAATELVHLHEHHHSSISAVSLEFFEAERAFAVSSYRDVHAIGSDLLYRCGDYGFEVVRCKAAIWCCEDGQYRLLQLQSIGDLFDVTPMVGQSVPFGCTRALVLGKQLDEVKLRDIFAKYLKATK

SEQ ID NO: 8193 - DNA, 1080 bp, Homo sapiens
  CDS (1)..(1080)
atgtatttcaaacgtgcccctcgggcctttcccgtgttgctcactggtgctgggaagacaacacttctgaactatattttgacagagcaacatagtaaaagagtagcggtcattttaaatgaatctggggaaggaagtgcgctggagaaatccttagctgtcagccaaggtggagagctctatgaagagtggctggaacttagaaacggttgcctctgctgttcagtgaaggacaatggccttagagctattgagaatttgatgcaaaagaaggggaaatttgatgacatactgttagagaccactggattagcagaccctggtgcagtggcttctatgttttgggttgatgccgaattagggagtgatatttaccttgatggtatcataactattgtggattcaaaatatggattaaaacatttaacagaagagaaacctgatggccttatcaatgaagctactaggcaagttgctttggcagatatcattctcattaataaaacagacttggtcccagaagaagatgtaaagaaattaagaacgacacttagatccataaatggactaggacaaatcttagaaacacaaagatcaagagttgatctctctaatgtattagatcttcatgcctttgatagtctctctggaataagtttgcagaaaaaacttcagcatgtgccaggaacacaacctcaccttgatcagagtattgttacaatcacatttgacgtaccaggaaatgcaaaggaagaacatcttaatatgtttattcagaatcttctgtgggaaaagaatgtgagaaacaaggacaatcactgcatggaggtcataaggctgaagggattggtgtcaatcaaagacaaatcacaacaagtgattgtccagggtgtccatgagctctgtgatctggaggagactccagtgagctggaaggatgacactgagagaacaaatcgattggtcctcattggcagaaatttagataaggatatccttaaacagctgtttatagctactgtgacagaaacagaaaagcagtggacaacacatttcaaagaagatcaagtttgtacataa

SEQ ID NO: 8194 - protein, 359 aa, Homo sapiens
MYFKRAPRAFPVLLTGAGKTTLLNYILTEQHSKRVAVILNESGEGSALEKSLAVSQGGELYEEWLELRNGCLCCSVKDNGLRAIENLMQKKGKFDDILLETTGLADPGAVASMFWVDAELGSDIYLDGIITIVDSKYGLKHLTEEKPDGLINEATRQVALADIILINKTDLVPEEDVKKLRTTLRSINGLGQILETQRSRVDLSNVLDLHAFDSLSGISLQKKLQHVPGTQPHLDQSIVTITFDVPGNAKEEHLNMFIQNLLWEKNVRNKDNHCMEVIRLKGLVSIKDKSQQVIVQGVHELCDLEETPVSWKDDTERTNRLVLIGRNLDKDILKQLFIATVTETEKQWTTHFKEDQVCT

SEQ ID NO: 8195 - DNA, 1188 bp, Homo sapiens
  CDS (1)..(1188)
atgttaccggctgttggatctgtggatgaggaagaggatcctgcggaggaggattgtcctgaattggttcccattgagacgacgcaaagcgaggaggaggaaaagtctggcctcggcgccaagatcccagtcacaattatcaccgggtatttaggtgctgggaagacaacacttctgaactatattttgacagagcaacatagtaaaagagtagcggtcattttaaatgaatctggggaaggaagtgcgctggagaaatccttagctgtcagccaaggtggagagctctatgaagagtggctggaacttagaaacggttgcctctgctgttcagtgaaggacaatggccttagagctattgagaatttgatgcaaaagaaggggaaatttgatgacatactgttagagaccactggattagcagaccctggtgcagtggcttctatgttttgggttgatgccgaattagggagtgatatttaccttgatggtatcataactattgtggattcaaaatatggattaaaacatttaacagaagagaaacctgatggccttatcaatgaagctactaggcaagttgctttggcagatatcattctcattaataaaacagacttggtcccagaagaagatgtaaagaaattaagaacgacacttagatccataaatggactaggacaaatcttagaaacacaaagatcaagagttgatctctctaatgtattagatcttcatgcctttgatagtctctctggaataagtttgcagaaaaaacttcagcatgtgccaggaacacaacctcaccttgatcagagtattgttacaatcacatttgacgtaccaggaaatgcaaaggaagaacatcttaatatgtttattcagaatcttctgtgggaaaagaatgtgagaaacaaggacaatcactgcatggaggtcataaggctgaagggattggtgtcaatcaaagacaaatcacaacaagtgattgtccagggtgtccatgagctctgtgatctggaggagactccagtgagctggaaggatgacactgagagaacaaatcgattggtcctcattggcagaaatttagataaggatatccttaaacagctgtttatagctactgtgacagaaacagaaaagcagtggacaacacatttcaaagaagatcaagtttgtacataa

SEQ ID NO: 8196 - protein, 395 aa, Homo sapiens
MLPAVGSVDEEEDPAEEDCPELVPIETTQSEEEEKSGLGAKIPVTIITGYLGAGKTTLLNYILTEQHSKRVAVILNESGEGSALEKSLAVSQGGELYEEWLELRNGCLCCSVKDNGLRAIENLMQKKGKFDDILLETTGLADPGAVASMFWVDAELGSDIYLDGIITIVDSKYGLKHLTEEKPDGLINEATRQVALADIILINKTDLVPEEDVKKLRTTLRSINGLGQILETQRSRVDLSNVLDLHAFDSLSGISLQKKLQHVPGTQPHLDQSIVTITFDVPGNAKEEHLNMFIQNLLWEKNVRNKDNHCMEVIRLKGLVSIKDKSQQVIVQGVHELCDLEETPVSWKDDTERTNRLVLIGRNLDKDILKQLFIATVTETEKQWTTHFKEDQVCT

SEQ ID NO: 8197 - DNA, 729 bp, Homo sapiens
  CDS (1)..(729)
atgttaccggctgttggatctgtggatgaggaagaggatcctgcggaggaggattgtcctgaattggttcccattgagacgacgcaaagcgaggaggaggaaaagtctggcctcggcgccaagatcccagtcacaattatcaccgggtatttaggtgctgggaagacaacacttctgaactatattttgacagagcaacatagtaaaagagtagcggtcattttaaatgaatctggggaaggaagtgcgctggagaaatccttagctgtcagccaaggtggagagctctatgaagagtggctggaacttagaaacggttgcctctgctgttcagtgaaggacaatggccttagagctattgagaatttgatgcaaaagaaggggaaatttgatgacatactgttagagaccactggattagcagaccctggtgcagtggcttctatgttttgggttgatgccgaattagggagtgatatttaccttgatggtatcataactattgtggattcaaaatatggattaaaacatttaacagaagagaaacctgatggccttatcaatgaagctactaggcaagttgctttggcagatatcattctcattaataaaacagacttggtcccagaagaagatgtaaagaaattaagaacgacacttaggtacaaaatgatgtgtgttaagtgcctacagatccatattgtatacacagaatgttttttactctga

SEQ ID NO: 8198 - protein, 242 aa, Homo sapiens
MLPAVGSVDEEEDPAEEDCPELVPIETTQSEEEEKSGLGAKIPVTIITGYLGAGKTTLLNYILTEQHSKRVAVILNESGEGSALEKSLAVSQGGELYEEWLELRNGCLCCSVKDNGLRAIENLMQKKGKFDDILLETTGLADPGAVASMFWVDAELGSDIYLDGIITIVDSKYGLKHLTEEKPDGLINEATRQVALADIILINKTDLVPEEDVKKLRTTLRYKMMCVKCLQIHIVYTECFLL

SEQ ID NO: 8199 - DNA, 1200 bp, Microbacterium sp
  CDS (1)..(1200): transl_table=11
atggtcgacacacgacttccggtcacggtgctgtcaggtttcctgggcgccgggaagacgacgctactcaacgagatcctgcgcaatcgggagggccgtcgggttgcggtgatcgtcaacgacatgagcgaaatcaacatcgacagtgcagaagtcgagcgtgagatctcgctcagtcgctccgaggagaaactggtcgagatgaccaacggctgcatctgctgcactctgcgagaggatcttctttccgagatcagcgccctggccgctgctggccgattcgactaccttctcatcgaatcttcgggcatctccgaaccgctgcccgtcgcggagacgttcaccttcatcgataccgacggccacgctctggccgacgtcgcccgactcgacaccatggtcaccgtggtcgacggcaacagttttctgcgcgactacacggctggaggtcgcgtcgaagccgatgctccggaagatgaacgagacatcgcggatctacttgtcgaccagatcgagtttgccgacgtcatcctggtgagcaaggccgatctgatctcgcaccagcacctggtcgaattgaccgcggtcctgcgatctttgaacgcaaccgctgcgattgttccgatgacgctcggtcgcatcccactcgacacgattctcgacaccggtttgttctcgctcgagaaagctgcacaggcccccggatggttacaagaactacaaggtgaacacactcccgaaaccgaagagtacggaatcagttcggtggtgtaccgcgagcgcgcacccttccacccccaacgtctgcatgacttcctcagcagcgagtggaccaacggaaagttactccgggccaagggctactactggaatgccggccggttcaccgagatcgggagtatttcccaggccggtcatctcattcgccacggatacgtcggccgttggtggaagtttctaccccgtgacgagtggccggccgacgattaccgccgcgacggaatcctcgacaagtgggaagaacctgtcggtgactgccgacaggaactcgtcttcatcggccaagccatcgacccgtctctactgcaccgagaactcgacgcgtgtctactcaccacagccgagatcgaactcgggcccagacgtgtggaccacctggagcgaccccctgggtgccgggtataccgaccagaccgttag

SEQ ID NO: 8200 - protein, 399 aa, Microbacterium sp
MVDTRLPVTVLSGFLGAGKTTLLNEILRNREGRRVAVIVNDMSEINIDSAEVEREISLSRSEEKLVEMTNGCICCTLREDLLSEISALAAAGRFDYLLIESSGISEPLPVAETFTFIDTDGHALADVARLDTMVTVVDGNSFLRDYTAGGRVEADAPEDERDIADLLVDQIEFADVILVSKADLISHQHLVELTAVLRSLNATAAIVPMTLGRIPLDTILDTGLFSLEKAAQAPGWLQELQGEHTPETEEYGISSVVYRERAPFHPQRLHDFLSSEWTNGKLLRAKGYYWNAGRFTEIGSISQAGHLIRHGYVGRWWKFLPRDEWPADDYRRDGILDKWEEPVGDCRQELVFIGQAIDPSLLHRELDACLLTTAEIELGPRRVDHLERPPGCRVYRPDR

SEQ ID NO: 8201 - DNA, 1242 bp, Pseudomonas sp
  CDS (1)..(1242): transl_table=11
atggacggcgcccaggcgggccgactgccggtgaccgtgctttccggcttcctcggcgccggcaagaccaccctgctcaaccacatcctgcgcaatcgcgagggcctgagagtcgcggtcatcgtcaacgacatgagcgagatcaacatcgatgccgcagaggtgcagcgcgatgtatcgctgcaccgtggccgcgatgagttgatcgagatgagcaatggctgtatctgctgcacgctgcgcgccgatctgctcgaacagatcagcgcgctggcgcgtcaacagcgcttcgactacctgcttatcgaatccaccgggatctcggagccgatgccggtcgcggagacgttcgccttccttgacgccgagggcttcagcctcagcgaactggcgcggctcgataccttggtgactttggtcgacggcagctgttttcaagcattgctggagtcaccggacagcgtcgcccgcgacgatgcccaggtagacgcgcccagacgcccgctggcggacctgctgattgagcaggtggagtacgccaacgtgatcctcgtcaacaaactggacctgatcgacgagccggcctatcaggctgtgcgggcgatccttgcgggcctcaacccgaccgcacggatcctgccgatgacccagggcaacgtcaggttggccagcatcctcgatacccgtctgttcgatctacccagccttgcggcagcgccgggctggatgcgcaagctggagcctgacagcgcaacggcgtccgagtcggacacctacggtgtgacctcctgggtgtaccgcgagcgcgcaccgtttcacccccagcgcttgctcgactttctcaagcgcccctggagcaacgggcgcctgttgcgcagcaaaggttacttctggcttgccagccgacacctggaaaccggcttgctggtgcacagcggcaagcaattccagtgggactatgtggggcattggtggagcttcatagcgccgtcgcaatggccaaaggacgaataccgcttgcaaggcatcatggccaagtgggacggcgtggtcggcgactgtcggcaggagctggtctttatcggccaggacctcgatacacaggcgttgcagcgcgaactcgaccattgcctgctcagccccgaggaaatcgccgcgggcccggcggcctggcccgccctgccgggggcgacggcctttgacacccgtgccttgtcggccagcccgacggcttccatttaa

SEQ ID NO: 8202 - protein, 413 aa, Pseudomonas sp
MDGAQAGRLPVTVLSGFLGAGKTTLLNHILRNREGLRVAVIVNDMSEINIDAAEVQRDVSLHRGRDELIEMSNGCICCTLRADLLEQISALARQQRFDYLLIESTGISEPMPVAETFAFLDAEGFSLSELARLDTLVTLVDGSCFQALLESPDSVARDDAQVDAPRRPLADLLIEQVEYANVILVNKLDLIDEPAYQAVRAILAGLNPTARILPMTQGNVRLASILDTRLFDLPSLAAAPGWMRKLEPDSATASESDTYGVTSWVYRERAPFHPQRLLDFLKRPWSNGRLLRSKGYFWLASRHLETGLLVHSGKQFQWDYVGHWWSFIAPSQWPKDEYRLQGIMAKWDGVVGDCRQELVFIGQDLDTQALQRELDHCLLSPEEIAAGPAAWPALPGATAFDTRALSASPTASI

SEQ ID NO: 8203 - DNA, 1125 bp, Arabidopsis thaliana
  CDS (1)..(1125)
atgctgaaggaagaagctgagggagtgaaaatggaagatgatgatgaagaaccaccgatggctgttcaaatccatccggatgtttctgtcggaaaggttcactcatcaagcgatactgtttcagttggtgtgtctgttatcactggctatctcggcgcgggaaaatccactcttgtgaattatatattgaacgggaaacacgggaagagaatagctgtgattttgaatgagtttggggaagagattggagttgagagggctatgattaacgaaggagaagaaggtgccattgttgaagaatgggttgagctcgctaatggctgtgtttgttgtactgtcaagcatagtcttgttcaagctctcgagcagcttgttcagagaaaagacaggcttgatcatatattattggagacaacaggtttagcaaacccagctccattggcttctattctttggttggatgaccagttagaatcagaagtcaagcttgactgtattgttactgtcgtggatgcaaagaatcttcgttttcagctcaatgagcgtcgtgactcatcctcgtttcctgaggcctttaatcaaatagcatttgcggacacgataataatgaacaaggtggacttgatttctcaagaggagtctgatgaattagagaaggagattcattccatcaactcgctcgccaatgtcatccgatctgttaggtgccaagttgatttgtccaatatattaaactgccaggcatatgattcaactcatgttagtcgtctggaatccctgctggaagcaaataaatcattaacgacgacagatcttcacgatagtggagtaaggactctatgcatcagcgaaccgcaacctataaacctcgataaggttcgtttatggctggaggaaattctgtgggataaaaaatcggagatggatgtataccgttgcaaggctgtgttgagcattcaaaactcagaccagatgcatattttgcaggccgttagagatatatatgagatagtgccagctcgaaaatggagcgaggaagagaatcgaacaaacaaaatagtatttataggacacaaactggatgaagaagttctcagaagcggattaagagattgcagaccctag

SEQ ID NO: 8204 - protein, 374 aa, Arabidopsis thaliana
MLKEEAEGVKMEDDDEEPPMAVQIHPDVSVGKVHSSSDTVSVGVSVITGYLGAGKSTLVNYILNGKHGKRIAVILNEFGEEIGVERAMINEGEEGAIVEEWVELANGCVCCTVKHSLVQALEQLVQRKDRLDHILLETTGLANPAPLASILWLDDQLESEVKLDCIVTVVDAKNLRFQLNERRDSSSFPEAFNQIAFADTIIMNKVDLISQEESDELEKEIHSINSLANVIRSVRCQVDLSNILNCQAYDSTHVSRLESLLEANKSLTTTDLHDSGVRTLCISEPQPINLDKVRLWLEEILWDKKSEMDVYRCKAVLSIQNSDQMHILQAVRDIYEIVPARKWSEEENRTNKIVFIGHKLDEEVLRSGLRDCRP

SEQ ID NO: 8205 - DNA, 1191 bp, Rhodococcus sp
  CDS (1)..(1191): transl_table=11
atggtcgacacacgacttccggtcacggtgctgtcaggtttcctgggcgccgggaagacgacgctactcaacgagatcctgcgcaatcgggagggccgtcgggttgcggtgatcgtcaacgacatgagcgaaatcaacatcgacagtgcagaagtcgagcgtgagatctcgctcagtcgctccgaggaggagaaactggtcgagatgacaaacggctgcatctgctcgactctgcgagatcttctttccgagatcagcgccctggcccggtctggccgattcgactaccttctcatcgaatcttcgggcatctccgaaccgctgcccgtcggcgagacgttcaccttcatcgataccgacggccacgctctgagctcgcccgactcgacaccatggtcaccgctggtcgacgccaacagttttctgcgcgactacacggctggaggtcgcgtcgaagccgatgctccggaagatgaacgagacatcgcggatctacttgtcgaccagatcgagtttgccgacgtcatcctggtgagcaaggccgatctgatctcggcaccagcacctggtcgaattgacggcgtcctgcgatctttgaacgaaccgctgcgattgttcgatgacgggctcggtcgcatcccactcgacacgattctcgacaccggtttgttctcgctcgagaaagctgcacaggcccccggatggttacaagaactacaaggtgaacacactcccgaaaccgaagaagttcggtggtgtaccgcgagcacgtcgcacccttccacccccaacgtctgcatgacttcctcagcagcgagtggaccaacggaaagttactccgggccaaggcgtagtactggaatgacccgagccggttcaccgagatcggactatttccaggccggtcatctcattcgccacggatacgtcgagccgttggtggaagttctaccccgtgacgagtggccggccgacgattaccgccgcgacggaatcctcgacaagtgggaagaacctgtcggtgactgccgacaggaactcgtcttcatcggccaagcgatcgacccgtctctactgcaccgagaactcgacgcgtgtctactcaccacagccgagatcgaactcgggccaagacgtgtggaccacctggagcgaccccctggtgccgggtataccgaccagaccgtttga

SEQ ID NO: 8206 - protein, 396 aa, Rhodococcus sp
MVDTRLPVTVLSGFLGAGKTTLLNEILRNREGRRVAVIVNDMSEINIDSAEVEREISLSRSEEEKLVEMTNGCICSTLRDLLSEISALARSGRFDYLLIESSGISEPLPVGETFTFIDTDGHALSSPDSTPWSPLVDANSFLRDYTAGGRVEADAPEDERDIADLLVDQIEFADVILVSKADLISAPAPGRIDGVLRSLNEPLRLFDDGLGRIPLDTILDTGLFSLEKAAQAPGWLQELQGEHTPETEEVRWCTASTSHPSTPNVCMTSSAASGPTESYSGPRRSTGMTRAGSPRSDYFQAGHLIRHGYVEPLVEVLPRDEWPADDYRRDGILDKWEEPVGDCRQELVFIGQAIDPSLLHRELDACLLTTAEIELGPRRVDHLERPPGAGYTDQTV

SEQ ID NO: 8207 - DNA, 1113 bp, Cryptococcus neoformans var
  CDS (1)..(1113)
atgacgcttgagaaggatgaggctattcctgtgacctgttttactggatttcttggagctggcaagaccacaactatcctttcgcttatccagcaactaccgaaagagtacaaagtcgtactgctcaagaatgaatatggagacgttgaagtcgattctgtccttgcttctcagtccaacatcacaggcgtttctgaaattctgaacggctgtctctgttgcacgtctgtaggacttatctccaacgctttgatggaagtcaaatcaacaatgaaacccgaccgaatcattatcgaatctagcggatcggccttccctgcgacattggctttgcaaatcaaggaacttgaacctgaaggattcaagttggatggcgttgtgactgtggtggattgtgttaattttgaaggatacgaagattcatcgcctagtgcaaaattgcaagccaagtacaccgacctcatcctcctcaacaaacaccaccttcccaacccacgtcaattcgacactctcctggaccgtcttaacgatctcaacgacgagacccctaaactccgtattggtcccgccccttccaatccaccgaagcctgaagtcatctttggtcttgacagcaagctctggtccgtcaaggatggcgaaagaaaagattggggcgagatggcgactagagaaggatggcatggagatgaagtggaggtcaagggagtgtataaagggaagaagccgaaacatgaacacaagcgtgtgggaggaaaaggcgaaggcaaggaatgcggagattgtcaaaagccagaagttgaggagaacgttggacctgtggagccaattgagagagagcttttggagaaggaactgtccaagctctcttacgaaatctatcgagttaaaggtatcgttcgattcatgtctccttcaaacccatcaaaggctttcgacacgtatattctcaactacgccttttctcgatacaccctcacacctgcgccttctttggatgatgatcccgcgctcgaaggggtgagcataaggttgacagtgatgggtgagagaggggaagttgcaaggagagcaaggagatttggtgaagctattggcgctatgatggagtga

SEQ ID NO: 8208 - protein, 370 aa, Cryptococcus neoformans var
MTLEKDEAIPVTCFTGFLGAGKTTTILSLIQQLPKEYKVVLLKNEYGDVEVDSVLASQSNITGVSEILNGCLCCTSVGLISNALMEVKSTMKPDRIIIESSGSAFPATLALQIKELEPEGFKLDGVVTVVDCVNFEGYEDSSPSAKLQAKYTDLILLNKHHLPNPRQFDTLLDRLNDLNDETPKLRIGPAPSNPPKPEVIFGLDSKLWSVKDGERKDWGEMATREGWHGDEVEVKGVYKGKKPKHEHKRVGGKGEGKECGDCQKPEVEENVGPVEPIERELLEKELSKLSYEIYRVKGIVRFMSPSNPSKAFDTYILNYAFSRYTLTPAPSLDDDPALEGVSIRLTVMGERGEVARRARRFGEAIGAMME

SEQ ID NO: 8209 - DNA, 1158 bp, Cryptococcus neoformans var
  CDS (1)..(1158)
atggaagacgaacaagtacctcaacttcttgtatcaacacccgaagcagggacgtcatctcttcctcctgccagattcgaacggccgcaagtgcctatcactctcttaacagggtatttgggcgctggcaaatcaactctgctacagtacattcttacagccaatcatggatatcgcatagcagtttgcatgaacgatttcggcgatacgacagacattgagtctaaaagcctaacaatgtctgatccagactcgtcgaccactacctctgaatttcttagtctaccgaatggatgtctttgttgctctgtcaaggacatgggtatagcggcaattgaggacatggtcatgaaagctccgggtggagtcgactgggttgtggtcgaactgacaggtcttgcagaccccactccaatagttaagtctttctggtccaatgaggaaatgggggatctgtttctagacggagttgtctgcgtagtggacagccgcaatgtactaaagcaattagatggacacaaggattatgacgaaatcacggaatgccaaaagcaagtggcttctgcggacgtcatcctcttgaataaaatcgaccttgtgtcagaagaacacctctctaaggtggaacgcgctgttagagaactcaatgcaactctgagaatacattacacaaggaactctcaagctcccatttctgagctgtttcacatacgggcctttaccaattctgttactccagctatcaaggaagcacccgcggctctggacgatggtcatcaacattcatctgactgcggacatccccatgaaaatggagaattattgcctcatcgtaactccaggatcaatactacgcttattcccatcccaccactcaatctgcttcagtacaacagaattaacaccttccttgaatccgtcctctggtcagcgacttttcctgcttcatccaaagtagcaccggaaattttacggaccaaaggttatatcacacttcaagatgatagagcatttgttctgcaaggggtggccgatctgtttgaattgaaagaggtggacagggcgctcgatcctgagatgaaagggaagattgtgttcataggaaaaggagttggagaagatttgaagagagagttacaagtgtgggtcggcttgtaa

SEQ ID NO: 8210 - protein, 385 aa, Cryptococcus neoformans var
MEDEQVPQLLVSTPEAGTSSLPPARFERPQVPITLLTGYLGAGKSTLLQYILTANHGYRIAVCMNDFGDTTDIESKSLTMSDPDSSTTTSEFLSLPNGCLCCSVKDMGIAAIEDMVMKAPGGVDWVVVELTGLADPTPIVKSFWSNEEMGDLFLDGVVCVVDSRNVLKQLDGHKDYDEITECQKQVASADVILLNKIDLVSEEHLSKVERAVRELNATLRIHYTRNSQAPISELFHIRAFTNSVTPAIKEAPAALDDGHQHSSDCGHPHENGELLPHRNSRINTTLIPIPPLNLLQYNRINTFLESVLWSATFPASSKVAPEILRTKGYITLQDDRAFVLQGVADLFELKEVDRALDPEMKGKIVFIGKGVGEDLKRELQVWVGL

SEQ ID NO: 8211 - DNA, 441 bp, Schistosoma japonicum
  CDS (1)..(441)
atggatgacgttattccggacttagtgtatgatacaaaaccaacttccccaacttccgacaaagtccctgttatgattctgtcaggataccttggtgctgggaaaactactcttttgaattatattttaactcatactcataacaaaaggatagccgtccttttaaatgattttggagagggttcagctgtcgagtctagtattgcgtgtaatgaaaaagacggaagcctttttgaagaatggatagaattgcgcaatggttgcttatgttgttctttaaaagatgcgagtgtatgcgctattgaaaatctaatgaagaagaaagggaaatttgactatatcctgattgagacgtctggacttaccgatccaggttgtcagtgtccttggaagataatctttcatattatccaggtcctgttgcatcactcttctggttag

SEQ ID NO: 8212 - protein, 146 aa, Schistosoma japonicum
MDDVIPDLVYDTKPTSPTSDKVPVMILSGYLGAGKTTLLNYILTHTHNKRIAVLLNDFGEGSAVESSIACNEKDGSLFEEWIELRNGCLCCSLKDASVCAIENLMKKKGKFDYILIETSGLTDPGCQCPWKIIFHIIQVLLHHSSG

SEQ ID NO: 8213 - DNA, 1080 bp, Homo sapiens
  CDS (1)..(1080)
atgtatttcaaacgtgcccctcgggcctttcccgtgttgctcactggtgctgggaagacaacacttctgaactatattttgacagagcaacatagtaaaagagtagcggtcattttaaatgaatctggggaaggaagtgcgctggagaaatccttagctgtcagccaaggtggagagctctatgaagagtggctggaacttagaaacggttgcctctgctgttcagtgaaggacaatggccttagagctattgagaatttgatgcaaaagaaggggaaatttgatgacatactgttagagaccactggattagcagaccctggtgcagtggcttctatgttttgggttgatgctgaattagggagtgatatttaccttgatggtatcataactattgtggattcaaaatatggattaaaacatttaacagaagagaaacctgatggccttatcaatgaagctactaggcaagttgctttggcagatatcattctcattaataaaacagacttggttccagaagaagatgtaaagaaattaagaacgacaattagatccataaatggactaggacaaatcttagaaacacaaagatcaagagttgatctctctaatgtattagatcttcatgcctttgatagtctctctggaataagtttgcagaaaaaacttcagcatgtgccaggaacacaacctcaccttgatcagagtattgttacaatcacatttgaagtaccaggaaatgcaaaggaagaacatcttaatatgtttattcagaatcttctgtgggaaaagaatgtgagaaacaaggacaatcactgcatggaggtcataaggctgaagggattggtgtcaatcaaagacaaatcacaacaagtgattgtccagggtgtccatgagctctatgatctggaggagactccagtgagctggaaggatgacactgagagaacaaatcgattggtcctcattggcagaaatttagataaggatatccttaaacagctgtttatagctactgtgacagaaacagaaaagcagtggacaacacatttcaaagaagatcaagtttgtacataa

SEQ ID NO: 8214 - protein, 359 aa, Homo sapiens
MYFKRAPRAFPVLLTGAGKTTLLNYILTEQHSKRVAVILNESGEGSALEKSLAVSQGGELYEEWLELRNGCLCCSVKDNGLRAIENLMQKKGKFDDILLETTGLADPGAVASMFWVDAELGSDIYLDGIITIVDSKYGLKHLTEEKPDGLINEATRQVALADIILINKTDLVPEEDVKKLRTTIRSINGLGQILETQRSRVDLSNVLDLHAFDSLSGISLQKKLQHVPGTQPHLDQSIVTITFEVPGNAKEEHLNMFIQNLLWEKNVRNKDNHCMEVIRLKGLVSIKDKSQQVIVQGVHELYDLEETPVSWKDDTERTNRLVLIGRNLDKDILKQLFIATVTETEKQWTTHFKEDQVCT

SEQ ID NO: 8215 - DNA, 1188 bp, Homo sapiens
  CDS (1)..(1188)
atgttaccggctgttggatctgtggatgaggaagaggatcctgcggaggaggattgtcctgaattggttcccattgagacgacgcaaagcgaggaggaggaaaagtctggcctcggcgccaagatcccagtcacaattatcaccgggtatttaggtgctgggaagacaacacttctgaactatattttgacagagcaacatagtaaaagagtagcggtcattttaaatgaatctggggaaggaagtgcgctggagaaatccttagctgtcagccaaggtggagagctctatgaagagtggctggaacttagaaacggttgcctctgctgttcagtgaaggacaatggccttagagctattgagaatttgatgcaaaagaaggggaaatttgatgacatactgttagagaccactggattagcagaccctggtgcagtggcttctatgttttgggttgatgctgaattagggagtgatatttaccttgatggtatcataactattgtggattcaaaatatggattaaaacatttaacagaagagaaacctgatggccttatcaatgaagctactaggcaagttgctttggcagatatcattctcattaataaaacagacttggttccagaagaagatgtaaagaaattaagaacgacaattagatccataaatggactaggacaaatcttagaaacacaaagatcaagagttgatctctctaatgtattagatcttcatgcctttgatagtctctctggaataagtttgcagaaaaaacttcagcatgtgccaggaacacaacctcaccttgatcagagtattgttacaatcacatttgaagtaccaggaaatgcaaaggaagaacatcttaatatgtttattcagaatcttctgtgggaaaagaatgtgagaaacaaggacaatcactgcatggaggtcataaggctgaagggattggtgtcaatcaaagacaaatcacaacaagtgattgtccagggtgtccatgagctctatgatctggaggagactccagtgagctggaaggatgacactgagagaacaaatcgattggtcctcattggcagaaatttagataaggatatccttaaacagctgtttatagctactgtgacagaaacagaaaagcagtggacaacacatttcaaagaagatcaagtttgtacataa

SEQ ID NO: 8216 - protein, 395 aa, Homo sapiens
MLPAVGSVDEEEDPAEEDCPELVPIETTQSEEEEKSGLGAKIPVTIITGYLGAGKTTLLNYILTEQHSKRVAVILNESGEGSALEKSLAVSQGGELYEEWLELRNGCLCCSVKDNGLRAIENLMQKKGKFDDILLETTGLADPGAVASMFWVDAELGSDIYLDGIITIVDSKYGLKHLTEEKPDGLINEATRQVALADIILINKTDLVPEEDVKKLRTTIRSINGLGQILETQRSRVDLSNVLDLHAFDSLSGISLQKKLQHVPGTQPHLDQSIVTITFEVPGNAKEEHLNMFIQNLLWEKNVRNKDNHCMEVIRLKGLVSIKDKSQQVIVQGVHELYDLEETPVSWKDDTERTNRLVLIGRNLDKDILKQLFIATVTETEKQWTTHFKEDQVCT

SEQ ID NO: 8217 - DNA, 543 bp, Homo sapiens
  CDS (1)..(543)
atgttaccggctgttggatctgtggatgaggaagaggatcctgcggaggaggattgtcctgaattggttcccattgagacgacgcaaagcgaggaggaggaaaagtctggcctcggcgccaagatcccagtcacaattatcaccgggtatttaggtgctgggaagacaacacttctgaactatattttgacagagcaacatagtaaaagagtagcggtcattttaaatgaatctggggaaggaagtgcgctggagaaatccttagctgtcagccaaggtggagagctctatgaagagtggctggaacttagaaacggttgcctctgctgttcagtgaaggacaatggccttagagctattgagaatttgatgcaaaagaaggggaaatttgatgacatactgttagagaccactggattagcagaccctggtgcagtggcttctatgttttgggttgatgctgaattagggagtgatatttaccttgatggtatcataactattgtggattcaaaatatggattaaaagtgaaataccactaa

SEQ ID NO: 8218 - protein, 180 aa, Homo sapiens
MLPAVGSVDEEEDPAEEDCPELVPIETTQSEEEEKSGLGAKIPVTIITGYLGAGKTTLLNYILTEQHSKRVAVILNESGEGSALEKSLAVSQGGELYEEWLELRNGCLCCSVKDNGLRAIENLMQKKGKFDDILLETTGLADPGAVASMFWVDAELGSDIYLDGIITIVDSKYGLKVKYH

SEQ ID NO: 8219 - DNA, 1188 bp, Homo sapiens
  CDS (1)..(1188)
atgttaccggctgttggatctgtggatgaggaagaggatcctgcggaggaggattgtcctgaattggttcccattgagacgacgcaaagcgaggaggaggaaaagtctggcctcggcgccaagatcccagtcacaattatcaccgggtatttaggtgctgggaagacaacacttctgaactatattttgacagagcaacatagtaaaagagtagcggtcattttaaatgaatctggggaaggaagtgcgctggagaaatccttagctgtcagccaaggtggagagctctatgaagagtggctggaacttagaaacggttgcctctgctgttcagtgaaggacaatggccttagagctattgagaatttgatgcaaaagaaggggaaatttgatgacatactgttagagaccactggattagcagaccctggtgcagtgacttctatgttttgggttgatgctgaattagggagtgatatttaccttgatggtatcataactattgtggattcaaaatatggattaaaacatttaacagaagagaaacctgatggccttatcaatgaagctactaggcaagttgctttggcagatatcattctcattaataaaacagacttggttccagaagaagatgtaaagaaattaagaacgacaattagatccataaatggactaggacaaatcttagaaacacaaagatcaagagttgatctctctaatgtattagatcttcatgcctttgatagtctctctggaataagtttgcagaaaaaacttcagcatgtgccaggaacacaacctcaccttgatcagagtattgttacaatcacatttgaagtaccaggaaatgcaaaggaagaacatcttaatatgtttattcagaatctcctgtgggaaaagaatgtgagaaacaaggacaatcactgcatggaggtcataaggctgaagggattggtgtcaatcaaagacaaatcacaacaagtgattgtccagggtgtccatgagctctatgatctggaggagactccagtgagctggaaggatgacactgagagaacaaatcgattggtcctcattggcagaaatttagataaggatatccttaaacagctgtttatagctactgtgacagaaacagaaaagcagtggacaacacatttcaaagaagatcaagtttgtacataa

SEQ ID NO: 8220 - protein, 395 aa, Homo sapiens
MLPAVGSVDEEEDPAEEDCPELVPIETTQSEEEEKSGLGAKIPVTIITGYLGAGKTTLLNYILTEQHSKRVAVILNESGEGSALEKSLAVSQGGELYEEWLELRNGCLCCSVKDNGLRAIENLMQKKGKFDDILLETTGLADPGAVTSMFWVDAELGSDIYLDGIITIVDSKYGLKHLTEEKPDGLINEATRQVALADIILINKTDLVPEEDVKKLRTTIRSINGLGQILETQRSRVDLSNVLDLHAFDSLSGISLQKKLQHVPGTQPHLDQSIVTITFEVPGNAKEEHLNMFIQNLLWEKNVRNKDNHCMEVIRLKGLVSIKDKSQQVIVQGVHELYDLEETPVSWKDDTERTNRLVLIGRNLDKDILKQLFIATVTETEKQWTTHFKEDQVCT

SEQ ID NO: 8221 - DNA, 1131 bp, Homo sapiens
  CDS (1)..(1131)
atgttaccggctgttggatctgtggatgaggaagaggatcctgcggaggaggattgtcctgaattggttcccattgagacgacgcaaagcgaggaggaggaaaagtctggcctcggcgccaagatcccagtcacaattatcaccgggtatttaggtgctgggaagacaacacttctgaactatattttgacagagcaacatagtaaaagagtagcggtcattttaaatgaatctggggaaggaagtgcgctggagaaatccttagctgtcagccaaggtggagagctctatgaagagtggctggaacttagaaacggttgcctctgctgttcagtgaaggacaatggccttagagctattgagaatttgatgcaaaagaaggggaaatttgatgacatactgttagagaccactggattagcagaccctggtgcagtgacttctatgttttgggttgatgctgaattagggagtgatatttaccttgatggtatcataactattgtggattcaaaatatggattaaaacatttaacagaagagaaacctgatggccttatcaatgaagctactaggcaagttgctttggcagatatcattctcattaataaaacagacttggttccagaagaagatgtaaagaaattaagaacgacaattagatccataaatggactaggacaaatcttagaaacacaaagatcaagtttgcagaaaaaacttcagcatgtgccaggaacacaacctcaccttgatcagagtattgttacaatcacatttgaagtaccaggaaatgcaaaggaagaacatcttaatatgtttattcagaatctcctgtgggaaaagaatgtgagaaacaaggacaatcactgcatggaggtcataaggctgaagggattggtgtcaatcaaagacaaatcacaacaagtgattgtccagggtgtccatgagctctatgatctggaggagactccagtgagctggaaggatgacactgagagaacaaatcgattggtcctcattggcagaaatttagataaggatatccttaaacagctgtttatagctactgtgacagaaacagaaaagcagtggacaacacatttcaaagaagatcaagtttgtacataa

SEQ ID NO: 8222 - protein, 376 aa, Homo sapiens
MLPAVGSVDEEEDPAEEDCPELVPIETTQSEEEEKSGLGAKIPVTIITGYLGAGKTTLLNYILTEQHSKRVAVILNESGEGSALEKSLAVSQGGELYEEWLELRNGCLCCSVKDNGLRAIENLMQKKGKFDDILLETTGLADPGAVTSMFWVDAELGSDIYLDGIITIVDSKYGLKHLTEEKPDGLINEATRQVALADIILINKTDLVPEEDVKKLRTTIRSINGLGQILETQRSSLQKKLQHVPGTQPHLDQSIVTITFEVPGNAKEEHLNMFIQNLLWEKNVRNKDNHCMEVIRLKGLVSIKDKSQQVIVQGVHELYDLEETPVSWKDDTERTNRLVLIGRNLDKDILKQLFIATVTETEKQWTTHFKEDQVCT

SEQ ID NO: 8223 - DNA, 234 bp, Homo sapiens
  CDS (1)..(234)
atgtatttcaaacgtgcccctcgggcctttcccgtgttgctcactggtgctgggaagacaacacttctgaactatattttgacagagcaacatagtaaaagagtagcggtcattttaaatgaatctggggaaggaagtgcgctggagaaatccttagctgtcagccaaggtggagagctctatgaagagtggctggaacttagaaacggttgcctctgctgttcagtgaagtga

SEQ ID NO: 8224 - protein, 77 aa, Homo sapiens
MYFKRAPRAFPVLLTGAGKTTLLNYILTEQHSKRVAVILNESGEGSALEKSLAVSQGGELYEEWLELRNGCLCCSVK

SEQ ID NO: 8225 - DNA, 225 bp, Homo sapiens
  CDS (1)..(225)
atgtatttcaaacgtgcccctcgggcctttcccgtgttgctcactggtgctgggaagacaacacttctgaactatattttgacagagcaacatagtaaaagagtagcggtcattttaaatgaatctggggaaggaagtgcgctggagaaatccttagctgtcagccaaggtggagagctctatgaagagtggctggaacttagaaacggttgcctctgctgttag

SEQ ID NO: 8226 - protein, 74 aa, Homo sapiens
MYFKRAPRAFPVLLTGAGKTTLLNYILTEQHSKRVAVILNESGEGSALEKSLAVSQGGELYEEWLELRNGCLCC

SEQ ID NO: 8227 - DNA, 1080 bp, Homo sapiens
  CDS (1)..(1080)
atgtatttcaaacgtgcccctcgggcctttcccgtgttgctcactggtgctgggaagacaacacttctgaactatattttgacagagcaacatagtaaaagagtagcggtcattttaaatgaatctggggaaggaagtgcgctggagaaatccttagctgtcagccaaggtggagagctctatgaagagtggctggaacttagaaacggttgcctctgctgttcagtgaaggacaatggccttagagctattgagaatttgatgcaaaagaaggggaaatttgatgacatactgttagagaccactggattagcagaccctggtgcagtgacttctatgttttgggttgatgctgaattagggagtgatatttaccttgatggtatcataactattgtggattcaaaatatggattaaaacatttaacagaagagaaacctgatggccttatcaatgaagctactaggcaagttgctttggcagatatcattctcattaataaaacagacttggttccagaagaagatgtaaagaaattaagaacgacaattagatccataaatggactaggacaaatcttagaaacacaaagatcaagagttgatctctctaatgtattagatcttcatgcctttgatagtctctctggaataagtttgcagaaaaaacttcagcatgtgccaggaacacaacctcaccttgatcagagtattgttacaatcacatttgaagtaccaggaaatgcaaaggaagaacatcttaatatgtttattcagaatctcctgtgggaaaagaatgtgagaaacaaggacaatcactgcatggaggtcataaggctgaagggattggtgtcaatcaaagacaaatcacaacaagtgattgtccagggtgtccatgagctctatgatctggaggagactccagtgagctggaaggatgacactgagagaacaaatcgattggtcctcattggcagaaatttagataaggatatccttaaacagctgtttatagctactgtgacagaaacagaaaagcagtggacaacacatttcaaagaagatcaagtttgtacataa

SEQ ID NO: 8228 - protein, 359 aa, Homo sapiens
MYFKRAPRAFPVLLTGAGKTTLLNYILTEQHSKRVAVILNESGEGSALEKSLAVSQGGELYEEWLELRNGCLCCSVKDNGLRAIENLMQKKGKFDDILLETTGLADPGAVTSMFWVDAELGSDIYLDGIITIVDSKYGLKHLTEEKPDGLINEATRQVALADIILINKTDLVPEEDVKKLRTTIRSINGLGQILETQRSRVDLSNVLDLHAFDSLSGISLQKKLQHVPGTQPHLDQSIVTITFEVPGNAKEEHLNMFIQNLLWEKNVRNKDNHCMEVIRLKGLVSIKDKSQQVIVQGVHELYDLEETPVSWKDDTERTNRLVLIGRNLDKDILKQLFIATVTETEKQWTTHFKEDQVCT

SEQ ID NO: 8229 - DNA, 342 bp, Homo sapiens
  CDS (1)..(342)
atgttaccggctgttggatctgtggatgaggaagaggatcctgcggaggaggattgtcctgaattggttcccattgagacgacgcaaagcgaggaggaggaaaagtctggcctcggcgccaagatcccagtcacaattatcaccgggtatttaggtgctgggaagacaacacttctgaactatattttgacagagcaacatagtaaaagagtagcggtcattttaaatgaatctggggaaggaagtgcgctggagaaatccttagctgtcagccaaggtggagagctctatgaagagtggctggaacttagaaacggttgcctctgctgttcagtgaagtga

SEQ ID NO: 8230 - protein, 113 aa, Homo sapiens
MLPAVGSVDEEEDPAEEDCPELVPIETTQSEEEEKSGLGAKIPVTIITGYLGAGKTTLLNYILTEQHSKRVAVILNESGEGSALEKSLAVSQGGELYEEWLELRNGCLCCSVK

SEQ ID NO: 8231 - DNA, 1185 bp, Rattus norvegicus
  CDS (1)..(1185)
atgttacctgctatgaaaaccgtggaggcggaagaagagtacgcggaggattgtcccgaattggtccccattgagaccaagcaccaagaaaaagaagaaaatcttgacttcatcattaagattccagtcacaattgtcaccgggtatttaggtgctggaaagacaacacttctgaattacattctgacagaacaacataataggaaaatagcagtgatcttaaatgaatttggagaagggagtgcagtagagaaatccttagctgtcagtcaaggaggagaactctatgaagaatggctggaacttagaaacggttgcctctgctgttcggtcaaggacaatggccttaaagctatagagaatctgatgcagaagaagggcaagtttgattacatactcttagagaccactgggctagcagatcctggtgcagtggcttctatgttttgggttgatgctgagttaggaagtgatatttatcttgatggcatcataactgttgtagattcaaaatatggattaaaacatttaactgaagaaaaacctgatggccttgtcaatgaagctactaggcaagttgctttggcagacatgattctcatcaataaaacagacttggtttcagaagaggagctaaacaaattgagaacaactatcagatcaataaatggactgggaaaagttttagaaactcaaagatcaagaactcatctctcaaatatattagatcttcatgcctatgacactctctctggtataagtttgcagaaaaaactccagcatgtgtcaacggcaccccaccttgatcagagcattgttacagtcacatttgacgtaccaggaagtgcagaggaagagagtctaaatgtatttatccagaatctcctgtgggaaaagaatgtgaagaacaaggacggccgctgcatggaggtcatccggctgaagggcctggtgtctatcaaagacaaaccacagcaaatgattgtgcaaggcatccatgagctgtacgagctggaagagagccgagtgaactggaaggacgatgccgagagagcctgccagctggtctttattggtaaaaatttagataaggatattcttcaacaactcttcatcactgctgtggcagagacaaaagaacaaacgacagcaccaggccaagatggagcctgtccgccgcactag

SEQ ID NO: 8232 - protein, 394 aa, Rattus norvegicus
MLPAMKTVEAEEEYAEDCPELVPIETKHQEKEENLDFIIKIPVTIVTGYLGAGKTTLLNYILTEQHNRKIAVILNEFGEGSAVEKSLAVSQGGELYEEWLELRNGCLCCSVKDNGLKAIENLMQKKGKFDYILLETTGLADPGAVASMFWVDAELGSDIYLDGIITVVDSKYGLKHLTEEKPDGLVNEATRQVALADMILINKTDLVSEEELNKLRTTIRSINGLGKVLETQRSRTHLSNILDLHAYDTLSGISLQKKLQHVSTAPHLDQSIVTVTFDVPGSAEEESLNVFIQNLLWEKNVKNKDGRCMEVIRLKGLVSIKDKPQQMIVQGIHELYELEESRVNWKDDAERACQLVFIGKNLDKDILQQLFITAVAETKEQTTAPGQDGACPPH

SEQ ID NO: 8233 - DNA, 1131 bp, Homo sapiens
  CDS (1)..(1131)
atgttaccggctgttggatctgcggatgaggaggaggatcctgcggaggaggattgtcctgaattggttcccattgagacgacgcaaagcgaggaggaggaaaagtctggcctcggcgccaagatcccagtcacaattatcaccgggtatttaggtgctgggaagacaacacttctgaactatattttgacagagcaacatagtaaaagagtagcggtcattttaaatgaatttggggaaggaagtgcgctggagaaatccttagctgtcagccaaggtggagagctctatgaagagtggctggaacttagaaacggttgcctctgctgttcagtgaaggacagtggccttagagctattgagaatttgatgcaaaagaaggggaaatttgattacatactgttagagaccactggattagcagaccctggtgcagtggcttctatgttttgggttgatgctgaattagggagtgatatttatcttgatggtatcataactattgtggattcaaaatatggattaaaacatttaacagaagagaaacctgatggccttatcaatgaagctactagacaagttgctttggcagatgccattctcattaataaaacagacctggttccagaagaagatgtaaagaaattaagaacgacaattagatccataaatggactaggacaaatcttagaaacacaaagatcaagtttgcagaaaaaacttcagcatgtgccaggaacacaacctcaccttgatcagagtattgttacaatcacatttgaagtaccaggaaatgcaaaggaagaacatcttaatatgtttattcagaatctcctgtgggaaaagaatgtgagaaacaaggacaatcactgcatggaggtcataaggctgaagggattggtgtcaatcaaagacaaatcacaacaagtgattgtccagggtgtccatgagctctatgatctggaggagactccagtgagctggaaggatgacactgagagaacaaatcgattggtcctccttggcagaaatttagataaggatatccttaaacagctgtttatagctactgtgacagaaacagaaaagcagtggacaacacgtttccaagaagatcaagtttgtacataa

SEQ ID NO: 8234 - protein, 376 aa, Homo sapiens
MLPAVGSADEEEDPAEEDCPELVPIETTQSEEEEKSGLGAKIPVTIITGYLGAGKTTLLNYILTEQHSKRVAVILNEFGEGSALEKSLAVSQGGELYEEWLELRNGCLCCSVKDSGLRAIENLMQKKGKFDYILLETTGLADPGAVASMFWVDAELGSDIYLDGIITIVDSKYGLKHLTEEKPDGLINEATRQVALADAILINKTDLVPEEDVKKLRTTIRSINGLGQILETQRSSLQKKLQHVPGTQPHLDQSIVTITFEVPGNAKEEHLNMFIQNLLWEKNVRNKDNHCMEVIRLKGLVSIKDKSQQVIVQGVHELYDLEETPVSWKDDTERTNRLVLLGRNLDKDILKQLFIATVTETEKQWTTRFQEDQVCT

SEQ ID NO: 8235 - DNA, 234 bp, Homo sapiens
  CDS (1)..(234)
atgtatttcaaacgtgccgctcgggcctttcccgtattgctcactggtgctgggaagacaacacttctgaactatattttgacagagcaacatagtaaaagagtagcggtcattttaaatgaatttggggaaggaagtgcgctggagaaatccttagctgtcagccaaggtggagagctctatgaagagtggctggaacttagaaacggttgcctctgctgttcagtgaagtga

SEQ ID NO: 8236 - protein, 77 aa, Homo sapiens
MYFKRAARAFPVLLTGAGKTTLLNYILTEQHSKRVAVILNEFGEGSALEKSLAVSQGGELYEEWLELRNGCLCCSVK

SEQ ID NO: 8237 - DNA, 1344 bp, Oryza sativa
  CDS (1)..(1344)
atggcggcggcgctctgctccgcatccccggccatctccgccgcggcggcggcggctctcggtgcggccgcgcgccgcctgcgcgtgcgcgtgcgcgcagcctcgcggccctactgcgccgctccggctccgccacgggctgcggctgcggtgggggcacagtcctggagggcgcggcggcggtttgccgcgtcggcggcttccacgaccacggaggaggaggaggagggagcaggtgctgaggtgatgatcccgcccgacaaccgcatccccgccaccatcatcaccggcttcctcggctccgggaagacaaccttattaaatcacatcttgactgctcaccatggaaagcgtattgccgtcattgagaatgagtatggagaagttgatattgatggttcattagttgctgcacaaactgctggagctgaggacataatgatgctaaataatgggtgcctttgctgcactgttcgtggtgatttagtccgtatgattggcgaattggttgacaagaagaaggggaagtttgaccacattataattgaaaccactggtttagcaaatccagcacccattatacagactttctatgcagaagatacagtttttaatgatgtcaagctggatggtgttgtgactttagtagatgcaaagcatgcacggctacatctggatgaagtaaagcccaagggtatagtcaatgaagcagttcaacaaattgcatatgctgacagaatcatagttaacaagattgatcttgttagtgagcctgaagtatcttccttggttgagcgtattaggagcatgaatcgcatggctcatttgaaacgagccgagtatgggaaagttgatttggattacgtgcttggaattggaggctttgatttggagaggatcgagagtgcggtaactgaagtctcacatgaccaccacacagggcatgaacataaacatgaccatgaacaccatcatcacgaccatcatcaccatgaccatgaacacaaacatgaccatcatgcacacgatcacacccatgatcctggtgtttcttctgtaagcattgtttgtgaaggggagatggatcttgaaaaggctgacatgtggttgggaaacctactgctagaacgcagcgatgacatataccggatgaaggggctactttctgtcagtggaatgcctcagcgctttgtctttcagggagtgcacgacattttccagggatctcccgagagaatgtgggaaccaaatgagccacgcatcaacaagattgtattcataggcaagaatctcaatggggaagaactggagaagggcttcaaggattgcctactgaagaaataa

SEQ ID NO: 8238 - protein, 447 aa, Oryza sativa
MAAALCSASPAISAAAAAALGAAARRLRVRVRAASRPYCAAPAPPRAAAAVGAQSWRARRRFAASAASTTTEEEEEGAGAEVMIPPDNRIPATIITGFLGSGKTTLLNHILTAHHGKRIAVIENEYGEVDIDGSLVAAQTAGAEDIMMLNNGCLCCTVRGDLVRMIGELVDKKKGKFDHIIIETTGLANPAPIIQTFYAEDTVFNDVKLDGVVTLVDAKHARLHLDEVKPKGIVNEAVQQIAYADRIIVNKIDLVSEPEVSSLVERIRSMNRMAHLKRAEYGKVDLDYVLGIGGFDLERIESAVTEVSHDHHTGHEHKHDHEHHHHDHHHHDHEHKHDHHAHDHTHDPGVSSVSIVCEGEMDLEKADMWLGNLLLERSDDIYRMKGLLSVSGMPQRFVFQGVHDIFQGSPERMWEPNEPRINKIVFIGKNLNGEELEKGFKDCLLKK

SEQ ID NO: 8239 - DNA, 1083 bp, Xenopus laevis
  CDS (1)..(1083)
atggaggatgaggaggactgcccagaacttgttcccataacagatattacgcaagatgagaaaaaaatccctgtcactataattacaggttatttaggtgcaggaaaaactacgctgttgaactacattctgacagaacagcacaacaaaagaattgctgtcataatcaacgagtttggggaaggaagtgctgtggagaagtctttagcaataagtcaagctggcgaactgtacgaagaatggttggaattaaggaatggctgtctgtgttgctcagtaaaagacaatggtctaaaagccattgaaaatcttatgcagaagaaagggaagtttgactatatattgctggaaacaacaggattagcagatccaggcgcagtagcctcaatgttttgggttgatgctgaactaggaagtgacatatacttagatggcattgtatctgtagtggatgctaaatatgcactgcagcacattcaagaggaaaaaccagagggtcttatcgatgaggcagcaagacaggtggctttggctgatgtactaatcataaacaaaacagatttagtttcagaagaaaaactggatgccgtgagatcagctgtgagctttatcaatggatttgtcaaaattctggagacccagagatcaagagttgacttaatggatatattggacctacatgcatttgacagcctgtctgggagaagtttgcaggataaactggtgactagtacaggccatcctcatcttgataagagcattgtgacagtgacgtttgaagtgcctggcagtatatctgaagaaaacttgaatttgtttatacagaatctgttgtgggagaagaatgtaataaatatgactgggaatgccatggaggttatcagactgaagggattggtgtcagtcacggacaagcctcagcaggtgattttgcaaggtgtccatgaattgtatgatctggaagagacccaaatcagctggcaggacagcaatgacagcagagtgaaccgcatggtttttataggtagacatctggataagaagatactcgtgcagctgtttcggtcagctatgaaatcctga

SEQ ID NO: 8240 - protein, 360 aa, Xenopus laevis
MEDEEDCPELVPITDITQDEKKIPVTIITGYLGAGKTTLLNYILTEQHNKRIAVIINEFGEGSAVEKSLAISQAGELYEEWLELRNGCLCCSVKDNGLKAIENLMQKKGKFDYILLETTGLADPGAVASMFWVDAELGSDIYLDGIVSVVDAKYALQHIQEEKPEGLIDEAARQVALADVLIINKTDLVSEEKLDAVRSAVSFINGFVKILETQRSRVDLMDILDLHAFDSLSGRSLQDKLVTSTGHPHLDKSIVTVTFEVPGSISEENLNLFIQNLLWEKNVINMTGNAMEVIRLKGLVSVTDKPQQVILQGVHELYDLEETQISWQDSNDSRVNRMVFIGRHLDKKILVQLFRSAMKS

SEQ ID NO: 8241 - DNA, 1209 bp, uncultured marine gamma proteobacterium EBAC20E09
  CDS (1)..(1209)
atgcaaaataattttaacagattgcctgttactgtattgtctggttttttaggggctggtaaaaccacagtattaagccacatattaaataatcgtgaaaataaaaaagtcgctgttattgttaatgatatgagtgaaattaatattgatgcatctatggtaaataatgaagtttctttaaatcatagtgaggaaaagcttgtagaaatgagtaatggctgtatctgttgtacacttcgggaggatttacttctagaagtaaataaattagctaaagataaaaaatttgattatcttgttattgagtcaacaggtatatcagagcctcttccggtagctgaaactttcacatttgccgatgaaaaaggggtatcactttcagatgtagcaaggttagatactatggttacagtagtagacgcatttaacttcttaaaagattatgacgatgcaaaatatcttcaagatactggtgaatctcttggcgaagatgatgagcgaagcgtagcagacttactagttgatcaagttgaattttctgatgttattttaataagtaaaatcgatcttgttgatcaatgcgatttacataaattaaagggtattttaagaagccttaataccactgcaaaaataattcccatcactaaaggtcaggttgaaatcgacgatgtcttaaatacaggactatttaatttcgacaaagcgcaagaggcaccgggatggctaaaagaaatgagaggcgatcatactcctgaaactgaggagtatggtatttctagctttacctttgttgctcgtcgtcctttttatcctgataaattttatgaatttgttcataacacaaataaatttggaaagttaattcgttctaaaggatatttttggctcggttctcgtcttgaatatgctggacaatggagccaagctggtggaattgctcgatatggttttgctggaatgttttggaaatctgttccaaaacaaaattggccaacagatgaggaatctttaaagataattaaacaaaactgggaagaaccttttggagatatgcgtcaagaattagtctttattggtcaaggacttgataaggatgctatgatcggtgctcttgaaaattgtcttgtaacagaagacgatttgcttaagggagaagaattttggacaacattgaatgatcctttcccaccttggcaagagatttaa

SEQ ID NO: 8242 - protein, 402 aa, uncultured marine gamma proteobacterium EBAC20E09
MQNNFNRLPVTVLSGFLGAGKTTVLSHILNNRENKKVAVIVNDMSEINIDASMVNNEVSLNHSEEKLVEMSNGCICCTLREDLLLEVNKLAKDKKFDYLVIESTGISEPLPVAETFTFADEKGVSLSDVARLDTMVTVVDAFNFLKDYDDAKYLQDTGESLGEDDERSVADLLVDQVEFSDVILISKIDLVDQCDLHKLKGILRSLNTTAKIIPITKGQVEIDDVLNTGLFNFDKAQEAPGWLKEMRGDHTPETEEYGISSFTFVARRPFYPDKFYEFVHNTNKFGKLIRSKGYFWLGSRLEYAGQWSQAGGIARYGFAGMFWKSVPKQNWPTDEESLKIIKQNWEEPFGDMRQELVFIGQGLDKDAMIGALENCLVTEDDLLKGEEFWTTLNDPFPPWQEI

SEQ ID NO: 8243 - DNA, 855 bp, Escherichia coli
  CDS (1)..(855): transl_table=11
gtgattgaaaacgaattcggcgaagtctccgttgatgatcaactgattggcgaccgcgccatgcagatcaaaacgctgaccaacggctgcatctgctgttcgcgctccaacgagctggaagacgcactactcgacctgctggataatctcgacaagggcaatattcagttcgatcgtctggtcattgaatgcaccggcatggccgatcctggcccgattattcaaacctttttctcccatgagattttatgccagcgctacctgctggacggcgtgattgcgctggtggatgcggtacatgccgatgagcagatgaaccagttcaccatcgcccagtcccaggtgggctacgccgaccgtattctgctgactaaaaccgacgtcgcaggcgaagcagaaaaactgcgtgaacgcctggcgcgcatcaacgcccgtgcaccggtctacaccgttacccacggcgacatcgacctgggcctgctgttcaacaccaacggttttatgctggaagaaaacgtcgtcagcaccaaaccgcgtttccactttatcgcggacaaacaaaacgatatttcgtcgattgtggtggaactggattacccggtagatatcagcgaagtttcccgggtgatggaaaacctgctgctggaatcggcggataaactgctgcgttacaaagggatgctgtggattgacggcgaacctaaccgcctgctgttccagggcgtccagcgcctctacagcgccgactgggaccgcccgtggggcgatgaaaaaccgcatagcacgatggtgtttatcgggattcagctgccggaggatgagattcgggcggcgtttgcggggttgaggaagtaa

SEQ ID NO: 8244 - protein, 284 aa, Escherichia coli
MIENEFGEVSVDDQLIGDRAMQIKTLTNGCICCSRSNELEDALLDLLDNLDKGNIQFDRLVIECTGMADPGPIIQTFFSHEILCQRYLLDGVIALVDAVHADEQMNQFTIAQSQVGYADRILLTKTDVAGEAEKLRERLARINARAPVYTVTHGDIDLGLLFNTNGFMLEENVVSTKPRFHFIADKQNDISSIVVELDYPVDISEVSRVMENLLLESADKLLRYKGMLWIDGEPNRLLFQGVQRLYSADWDRPWGDEKPHSTMVFIGIQLPEDEIRAAFAGLRK

SEQ ID NO: 8245 - DNA, 945 bp, Methanococcus voltae
  CDS (1)..(945): transl_table=11
atgaacaaaataaaaatagacgtaatatcagggtatttaggttgtggaaaaactacattcattcaaaaattaattaaagctacagaaaatgaacgaattgtaatcattgaaaatgaatttggggatattggtatcgatggggatatattaagagataaaggtttagacgttgtagaacttgaaaaaggatgtatttgttgtactttaaaattaaactttttaaaatctcttaaagatatcgtagaatatatgaaacctactagaattattgtggagcctactggaatggctcttttaagtcaaatacttggtatcgtacttgatgagaataacaaggagattcaggacaattgtaagttaaattctgtaattactgtggttgatggtgaaaattacttagaccaagttgaattgttcggtgatttttttaatgaccaaataaggaatgcagacaagttaattatcagtaaatctcaatatataacccaaaatgaattagataatattgtaaattccttaaaagaactaaatgataatgcaatacttatttctgaaaattgggatagtatagattctgataaatttttaaaaatcattgatgataataaagaaacaatttcaaaagaactttacattggagatgttcacaaagctatgcaaggcgtttcaagtgttttagtcaattttaacaatcctttaaatgttgaagcttttaaaaatgctgtagaatctttaaaatctaataattatggattaattatgcgaggaaagggatatattaattatatggatgataaaaatcctgaagttagacgttatgcagaatttaactacgttggaaataactacgaacttgaaaatttaaatactaaaaaatcatccgaaatttgcataattggtaaagatttaaaagaaaaagaaatcctagatttatttaaattttaa

SEQ ID NO: 8246 - protein, 314 aa, Methanococcus voltae
MNKIKIDVISGYLGCGKTTFIQKLIKATENERIVIIENEFGDIGIDGDILRDKGLDVVELEKGCICCTLKLNFLKSLKDIVEYMKPTRIIVEPTGMALLSQILGIVLDENNKEIQDNCKLNSVITVVDGENYLDQVELFGDFFNDQIRNADKLIISKSQYITQNELDNIVNSLKELNDNAILISENWDSIDSDKFLKIIDDNKETISKELYIGDVHKAMQGVSSVLVNFNNPLNVEAFKNAVESLKSNNYGLIMRGKGYINYMDDKNPEVRRYAEFNYVGNNYELENLNTKKSSEICIIGKDLKEKEILDLFKF

SEQ ID NO: 8247 - DNA, 1188 bp, Gorilla gorilla
  CDS (1)..(1188)
atgttaccggctgttggatctgtggatgaggaagaggatcctgcggaggaggattgtcctgaattggttcccattgagacgacgcaaagcgaggaggaggaaaagtctggcctcggcgccaagatcccagtcacaattatcaccgggtatttaggtgctgggaagacaacacttctgaactatattttgacagagcaacatagtaaaagagtagcggtcattttaaatgaatttggggaaggaagtgcgctggagaaatccttagctgtcagccaaggtggagagctctatgaagagtggctggaacttagaaacggttgcctctgctgttcagtgagggacaatggccttagagctattgagaatttgatgcaaaagaaggggaaatttgattacatactgttagagaccactggattagcagaccctggtgcagtggcttctatgttttgggttgatgctgaattagggagtgatatttaccttgatggtatcataactattgtggattcaaaatatggattaaaacatttaacagaagagaaacctgatggccttatcaatgaagctactaggcaagttgctttggcagatatcattctcattaataaaacagacttggttccagaagaagatgtaaagaaattaagaacgacaattagatccataaatggactaggacaaatcttagaaacacaaagatcaagagttgatgtctctaatgtattagatcttcatgcctttgatagtctctctggaataagtttgcagaaaaaacttcagcatgtgccaggaacacaacctcaccttgatcagagtattgttacaatcacatttgaagtaccaggaaatgcaaaggaagaacatcttaatatgtttattcagaatctcctgtgggaaaagaatgtgagaaacaaggacaatcactgcatggaggtcgtaaggctgaagggattggtgtcaatcaaagacaaatcacaacaagtgattgtccagggtgtccatgagctctatgatctggaggagactccagtgagctggaaggatgacactgagagaacaaatcgattggtcctcattggcagaaatttagataaggatatccttaaacagctgtttatagctactgtgacagaaacagaaaagcagtggacaacacatttcaaagaagatcaagtttgtgcgtaa

SEQ ID NO: 8248 - protein, 395 aa, Gorilla gorilla
MLPAVGSVDEEEDPAEEDCPELVPIETTQSEEEEKSGLGAKIPVTIITGYLGAGKTTLLNYILTEQHSKRVAVILNEFGEGSALEKSLAVSQGGELYEEWLELRNGCLCCSVRDNGLRAIENLMQKKGKFDYILLETTGLADPGAVASMFWVDAELGSDIYLDGIITIVDSKYGLKHLTEEKPDGLINEATRQVALADIILINKTDLVPEEDVKKLRTTIRSINGLGQILETQRSRVDVSNVLDLHAFDSLSGISLQKKLQHVPGTQPHLDQSIVTITFEVPGNAKEEHLNMFIQNLLWEKNVRNKDNHCMEVVRLKGLVSIKDKSQQVIVQGVHELYDLEETPVSWKDDTERTNRLVLIGRNLDKDILKQLFIATVTETEKQWTTHFKEDQVCA

SEQ ID NO: 8249 - DNA, 1188 bp, Gorilla gorilla
  CDS (1)..(1188)
atgttaccggctgttggatctgtggatgaggaagaggatcctgcggaggaggattgtcctgaattggttcccattgagacgacgcaaagcgaggaggaggaaaagtctggcctcggcgccaagatcccagtcacaattatcaccgggtatttaggtgctgggaagacaacacttctgaactatattttgacagagcaacatagtaaaagagtagcggtcattttaaatgaatttggggaaggaagtgcgctggagaaatccttagctgtcagccaaggtggagagctctatgaagagtggctggaacttagaaacggttgcctctgctgttcagtgagggacaatggccttagagctattgagaatttgatgcaaaagaaggggaaatttgattacatactgttagagaccactggattagcagaccctggtgcagtggcttctatgttttgggttgatgctgaattagggagtgatatttaccttgatggtatcataactattgtggattcaaaatatggattaaaacatttaacagaagagaaacctgatggccttatcaatgaagctactaggcaagttgctttggcagatatcattctcattaataaaacagacttggttccagaagaagatgtaaagaaattaagaacgacaattagatccataaatggactaggacaaatcttagaaacacaaagatcaagagttgatgtctctaatgtattagatcttcatgcctttgatagtctctctggaataagtttgcagaaaaaacttcagcatgtgccaggaacacaacctcaccttgatcagagtattgttacaatcacatttgaagtaccaggaaatgcaaaggaagaacatcttaatatgtttattcagaatctcctgtgggaaaagaatgtgagaaacaaggacaatcactgcatggaggtcataaggctgaagggattggtgtcaatcaaagacaaatcacaacaagtgattgtccagggtgtccatgagctctatgatctggaggagactccagtgagctggaaggatgacactgagagaacaaatcgattggtcctccttggcagaaatttagataaggatatccttaaacagctgtttatagctactgtgacagaaacagaaaagcagtggacaacacatttcaaagaagatcaagtttgtacataa

SEQ ID NO: 8250 - protein, 395 aa, Gorilla gorilla
MLPAVGSVDEEEDPAEEDCPELVPIETTQSEEEEKSGLGAKIPVTIITGYLGAGKTTLLNYILTEQHSKRVAVILNEFGEGSALEKSLAVSQGGELYEEWLELRNGCLCCSVRDNGLRAIENLMQKKGKFDYILLETTGLADPGAVASMFWVDAELGSDIYLDGIITIVDSKYGLKHLTEEKPDGLINEATRQVALADIILINKTDLVPEEDVKKLRTTIRSINGLGQILETQRSRVDVSNVLDLHAFDSLSGISLQKKLQHVPGTQPHLDQSIVTITFEVPGNAKEEHLNMFIQNLLWEKNVRNKDNHCMEVIRLKGLVSIKDKSQQVIVQGVHELYDLEETPVSWKDDTERTNRLVLLGRNLDKDILKQLFIATVTETEKQWTTHFKEDQVCT

SEQ ID NO: 8251 - DNA, 1188 bp, Pongo pygmaeus
  CDS (1)..(1188)
atgttaccggctgttggatctgtggatgaggaagaggatcctgcggaggaggattgtcctgaattggttcccattgagacgaagcaaagcgaggaggaggaaaagtctggcctcggcgccaagatcccagtcacaattatcaccgggtatttaggtgctgggaagacaacacttctgaactatattttgacagagcaacatagtaaaagagtagcggtcattttaaatgaatttggggaaggaagtgcgctggagaaatccttagctgtcagccaaggtggagagctctatgaagagtggctggaacttagaaatggttgcctctgctgttcagtgaaggacaatggccttagagctatggagaatttgatgcagaagaaggggaaatttgattacatactgttagagaccactggattagcagatcctggtgcagtggcttctatgttttgggttgatgctgaattagggagtgatatttaccttgatggtatcataactattgtggattcaaaatatggattaaaacatttaacagaagagaaacctgatggccttatcaatgaagctactaggcaagttgctttggcagatatcattctcatcaataaaacagacttggttccagaagaagatgtaaagaaattaagaacgacaattagatccataaatggactaggacaaatcttagaaacacaaagatcaagagttgatctctctaatgtattagatcttcatgcctttgatagtctctctggaataagtttgcagaaaaaacttcagcatgtgccaggaacacaacctcaccttgatcagagtattgttacaatcacatttgaagtaccaggaaatgcaaaggaagaacctcttaatatatttattcagaatctcctgtgggaaaagaatgtgagaaacaaggacaatcactgcatggaggtcataaggctgaagggattggtgtcaatcaaagacaaatcacaacaagtgattgtccagggtgtccatgagctctatgatctggaggagactccagtgagctggaaggatgacactgagagaacaaatcgattggtcctcattggcaagaatttagataaggatatccttaaacagctatttatagctactgtgacagaaacagaaaagcggtggacagcacatttcaaagaagatcaagtttgtacataa

SEQ ID NO: 8252 - protein, 395 aa, Pongo pygmaeus
MLPAVGSVDEEEDPAEEDCPELVPIETKQSEEEEKSGLGAKIPVTIITGYLGAGKTTLLNYILTEQHSKRVAVILNEFGEGSALEKSLAVSQGGELYEEWLELRNGCLCCSVKDNGLRAMENLMQKKGKFDYILLETTGLADPGAVASMFWVDAELGSDIYLDGIITIVDSKYGLKHLTEEKPDGLINEATRQVALADIILINKTDLVPEEDVKKLRTTIRSINGLGQILETQRSRVDLSNVLDLHAFDSLSGISLQKKLQHVPGTQPHLDQSIVTITFEVPGNAKEEPLNIFIQNLLWEKNVRNKDNHCMEVIRLKGLVSIKDKSQQVIVQGVHELYDLEETPVSWKDDTERTNRLVLIGKNLDKDILKQLFIATVTETEKRWTAHFKEDQVCT

SEQ ID NO: 8253 - DNA, 1188 bp, Homo sapiens
  CDS (1)..(1188)
atgttaccggctgttggatctgtggatgaggaagaggatcctgcggaggaagattgtcctgaattggttcccattgagacgacgcaaagcgaggaggaggaaaagtctggcctcggcgccaagatcccagtcacaattatcaccgggtatttaggtgctgggaagacaacacttctgaactatattttgacagagcaacatagtaaaagagtagcggtcattttaaatgaatttggggaaggaagtgcgctggagaaatccttagctgtcagccaaggtggagagctctatgaagagtggctggaacttagaaacggttgcctctgctgttcagtgaaggacagtggccttagagctattgagaatttgatgcaaaagaaggggaaatttgattacatactgttagagaccactggattagcagaccctggtgcagtggcttctatgttttgggttgatgctgaattagggagtgatatttatcttgatggtatcataactattgtggattcaaaatatggattaaaacatttaacagaagagaaacctgatggccttatcaatgaagctactaggcaagttgctttggcagatgccattctcattaataaaacagacctggttccagaagaagatgtaaagaaattaagaacgacaattagatccataaatggactaggacaaatcttagaaacacaaagatcaagagttgatctctctaatgtattagatcttcatgcctttgatagtctctctggaataagtttgcagaaaaaacttcagcatgtgccaggaacacaacctcaccttgatcagagtattgttacaatcacatttgaagtaccaggaaatgcaaaggaagaacatcttaatatgtttattcagaatctcctgtgggaaaagaatgtgagaaacaaggacaatcactgcatggaggtcataaggctgaagggattggtgtcaatcaaagacaaatcacaacaagtgattgtccagggtgtccatgagctctatgatctggaggagactccagtgagctggaaggatgacactgagagaacaaatcgattggtcctccttggcagaaatttagataaggatatccttaaacagctgtttatagctactgtgacagaaacagaaaagcagtggacaacacgtttccaagaagatcaagtttgtacataa

SEQ ID NO: 8254 - protein, 395 aa, Homo sapiens [sequence omitted]

SEQ ID NO: 8255 - DNA, 573 bp, Rhodococcus erythropolis
  CDS (1)..(573): transl_table=11
atggtcgacacacgacttccggtcacggtgctgtcaggtttcctgggcgccgggaagacgacactactcaacgagatcctgcgaaatcgagagggtcggcgggtcgcggtgatcgtcaacgacatgagcgaaatcaacatcgacagtgcagaagtcgagcgtgagatctcgctcagtcgctccgaggagaaactggtcgagatgacgaacggctgcatctgctgcactctgcgagaggatcttctctccgagatcagtgccttggccgccgatggccgattcgactacctactcatcgaatcttccggcatctccgaaccgcttcccgtcgcagagacgttcacattcatcgataccgacggccacgccctcgccgacgtcgcccgactcgacaccatggtcaccgtcgtcgacggccacagttttctgcgcgactacacggctgggggccgcgtcgaagccgatgccccggaagacgaacgagacatcgcggatctgcttgtcgatcagatcgaatttgccgacgtcatcctggtgagcaaggcagatctcgtctcgcaccagcacctttag

SEQ ID NO: 8256 - protein, 190 aa, Rhodococcus erythropolis
MVDTRLPVTVLSGFLGAGKTTLLNEILRNREGRRVAVIVNDMSEINIDSAEVEREISLSRSEEKLVEMTNGCICCTLREDLLSEISALAADGRFDYLLIESSGISEPLPVAETFTFIDTDGHALADVARLDTMVTVVDGHSFLRDYTAGGRVEADAPEDERDIADLLVDQIEFADVILVSKADLVSHQHL

SEQ ID NO: 8257 - DNA, 567 bp, Rhodococcus erythropolis
  CDS (1)..(567): transl_table=11
atggtcgacacacgacttccggtcacggtgctgtcaggtttcctgggcgccgggaagacgacactactcaacgagatcctgcgaaatcgagagggtcggcgggtcgcggtgatcgtcaacgacatgagcgaaatcaacatcgacagtgcagaagtcgagcgtgagatctcgctcagtcgctccgaagagaaactggtcgagatgaccaacggctgcatctgctgcactctgcgagaggatcttctttccgagatcagtgccttggccgccgatggccgattcgactacctactcatcgaatcttcgggcatctccgaaccgctgcccgtcgcagagacgttcacattcatcgataccgacggccacgccctcgccgacgtcgcccgactcgacaccatggtcaccgtcgtcgacggccacagttttctgcgcgactacacggctgggggccgcgtcgaagccgatgccccggaagacgaacgagacatcgcggatctgcttgtcgatcagatcgaatttgccgacgtcatcctggtgagcaaggccgatctcgtctcgcaccagtag

SEQ ID NO: 8258 - protein, 188 aa, Rhodococcus erythropolis
MVDTRLPVTVLSGFLGAGKTTLLNEILRNREGRRVAVIVNDMSEINIDSAEVEREISLSRSEEKLVEMTNGCICCTLREDLLSEISALAADGRFDYLLIESSGISEPLPVAETFTFIDTDGHALADVARLDTMVTVVDGHSFLRDYTAGGRVEADAPEDERDIADLLVDQIEFADVILVSKADLVSHQ

SEQ ID NO: 8259 - DNA, 564 bp, Rhodococcus erythropolis
  CDS (1)..(564): transl_table=11
atggtcgacacacgacttccggtcacggtgctgtcaggtttcctgggcgccgggaagacgacactactcaacgagatcctgcgaaatcgagagggtcggcgggtcgcggtgatcgtcaacgacatgagcgaaatcaacatcgacagtgcagaagtcgagcgtgagatctcgctcagtcgctccgaagagaaactggtcgagatgaccaacggctgcatctgctgcaccctgcgagaggatcttctctccgagatcagtgccttggccgccgatggccgattcgactacctactcatcgaatcttcgggcatctccgaaccgctgcccgtcgcagagacgttcacattcatcgataccgacggccacgccctcgccgacgtcgcccgactcgacaccatggtcaccgtcgtcgacggccacagttttctgcgcgactacacggctgggggccgcgtcgaagccgatgccccggaagacgaacgagacatcgcggatctgcttgtcgatcagatcgaatttgccgacgtcatcctggtgagcaaggccgatctcgtctcgcactag

SEQ ID NO: 8260 - protein, 187 aa, Rhodococcus erythropolis
MVDTRLPVTVLSGFLGAGKTTLLNEILRNREGRRVAVIVNDMSEINIDSAEVEREISLSRSEEKLVEMTNGCICCTLREDLLSEISALAADGRFDYLLIESSGISEPLPVAETFTFIDTDGHALADVARLDTMVTVVDGHSFLRDYTAGGRVEADAPEDERDIADLLVDQIEFADVILVSKADLVSH

SEQ ID NO: 8261 - DNA, 561 bp, Rhodococcus erythropolis
  CDS (1)..(561): transl_table=11
atggtcgacacacgacttccggtcacggtgctgtcaggtttcctgggcgccgggaagacgacactactcaacgagatcctgcgaaatcgagagggtcggcgggtcgcggtgatcgtcaacgacatgagcgaaatcaacatcgacagtgcagaagtcgagcgtgagatctcgctcagtcgctccgaggagaaactggtcgagatgaccaacggctgcatctgctgcactctgcgagaggatcttctttccgagatcagcgccttggccgccgatggccgattcgactacctactcatcgaatcttcgggcatctccgaaccgcttcccgtcgcagagacgttcacattcatcgataccgacggccacgccctcgccgacgtcgcccgactcgacaccatggtcaccgtcgtcgacggccacagttttctgcgcgactacacggctgggggccgcgtcgaagccgatgccccggaagacgaacgagacatcgcggatctgcttgtcgatcagatcgaatttgccgacgtcatcctggtgagcaaggccgatctcgtctcgtag

SEQ ID NO: 8262 - protein, 186 aa, Rhodococcus erythropolis
MVDTRLPVTVLSGFLGAGKTTLLNEILRNREGRRVAVIVNDMSEINIDSAEVEREISLSRSEEKLVEMTNGCICCTLREDLLSEISALAADGRFDYLLIESSGISEPLPVAETFTFIDTDGHALADVARLDTMVTVVDGHSFLRDYTAGGRVEADAPEDERDIADLLVDQIEFADVILVSKADLVS

SEQ ID NO: 8263 - DNA, 567 bp, Rhodococcus erythropolis
  CDS (1)..(567): transl_table=11
atggtcgacacacgacttccggtcacggtgctgtcaggtttcctgggcgccgggaagacgacactactcaacgagatcctgcgaaatcgagagggtcggcgggtcgcggtgatcgtcaacgacatgagcgaaatcaacatcgacagtgcaggagtcgagcgtgagatctcgctcagtcgctccgaagagaaactggtcgagatgaccaacggctgcatctgctgcaccctgcgagaggatcttctctccgagatcagtgccttggccgccgatggccgattcgactacctactcatcgaatcttcgggcatctccgaaccgctgcccgtcgcagagacgttcacattcatcgataccgacggccacgccctcgccgacgtcgcccgactcgacaccatggtcaccgtcgtcgacggccacagttttctgcgcgactacacggctgggggccgcgtcgaagccgatgccccggaagacgaacgagacatcgcggatctgcttgtcgatcagatcgaatttgccgacgtcatcctggtgagcaaggccgatctcgtctcgcaccagtag

SEQ ID NO: 8264 - protein, 188 aa, Rhodococcus erythropolis
MVDTRLPVTVLSGFLGAGKTTLLNEILRNREGRRVAVIVNDMSEINIDSAGVEREISLSRSEEKLVEMTNGCICCTLREDLLSEISALAADGRFDYLLIESSGISEPLPVAETFTFIDTDGHALADVARLDTMVTVVDGHSFLRDYTAGGRVEADAPEDERDIADLLVDQIEFADVILVSKADLVSHQ

SEQ ID NO: 8265 - DNA, 1278 bp, Bacillus amyloliquefaciens
  CDS (1)..(1278): transl_table=11
atgtacatcatgatgaaaaaagggcaggtgtggggtgtaaatcgtaatcattctattttgtcaggaggctattttatgaaaaaaattccggttacagtattgagcggctatcttggtgccggaaagacgaccgttttgaatcatattttacaaaaccgcaacggtttaaaaattgccgtcatcgtcaatgacatgagcgaagtaaatatagacgcgggcttggtgaagcagggaggcggcttgtcaaggacggatgagaaactcgtagaattatccaacggctgtatctgctgcacgctgcgtgaagatttattagtcgaagttgagaaactcgcgaaagacggcagatttgattatatagtgattgaatcaaccgggatcagcgaaccgattcccgttgcccagacattttcttatatagatgaagaaatgggcattgatctgacaactttctgcaggctggacacaatggtgaccgtggtggatgcaaaccgcttctggcatgatttccagtccggtgacagccttcttgaccggaaggaagcggcgggagaagaggatgaacgggtgattgccgatttattaattgaccaaatcgagttttgtgatgtgctcattttaaataaatgcgacatggtcggcgaaaaagagcttgaacagctggaaacggttcttcgcgcattacagccccgtgccagactgatccggtccgtccgcggagaagtgcccgccgaatacatattgaataccggtttatttgagtttgaggaagcgagttcatcagcaggatggataaaggagctgacggcaggtcatgaagcgcacactccggaaacggaagagtacggcatcacttcgtttgtgtactcgcggcgtttgccgtttcataccgttcgttttgacagctggctgcatcaatcaatgcctgacaacattgtgcgcgcaaaaggaattgcttggtgcgcaacccgcaacagccttgcgctgctgatgtctcaggcgggtccggcggtttcgattgagcctgtttcttattgggtggcggcaatgccgaaacttgagcaggagcagattaaacagcaggaaccggagattctggaagattgggacgaccaattcggagaccgtcatacgaacctggtgtttatcggaacagatttagatgaagcagccattacaaaggaattggatcagtgcctgctcacgccgtctgagttcgattccgattggtcgcagcttgaagatccttttcaatgggatattcagcgggccgaataa

SEQ ID NO: 8266 - protein, 425 aa, Bacillus amyloliquefaciens
MYIMMKKGQVWGVNRNHSILSGGYFMKKIPVTVLSGYLGAGKTTVLNHILQNRNGLKIAVIVNDMSEVNIDAGLVKQGGGLSRTDEKLVELSNGCICCTLREDLLVEVEKLAKDGRFDYIVIESTGISEPIPVAQTFSYIDEEMGIDLTTFCRLDTMVTVVDANRFWHDFQSGDSLLDRKEAAGEEDERVIADLLIDQIEFCDVLILNKCDMVGEKELEQLETVLRALQPRARLIRSVRGEVPAEYILNTGLFEFEEASSSAGWIKELTAGHEAHTPETEEYGITSFVYSRRLPFHTVRFDSWLHQSMPDNIVRAKGIAWCATRNSLALLMSQAGPAVSIEPVSYWVAAMPKLEQEQIKQQEPEILEDWDDQFGDRHTNLVFIGTDLDEAAITKELDQCLLTPSEFDSDWSQLEDPFQWDIQRAE

SEQ ID NO: 8267 - DNA, 1200 bp, Rhodococcus globerulus
  CDS (1)..(1200): transl_table=11
atggtcgacacacgacttccggtcacggtgctgtcaggtttcctgggcgccgggaagacgacactactcaacgagatcctgcgaaatcgagagggtcggcgggtcgcggtgatcgtcaacgacatgagcgaaatcaacatcgacagtgcagaagtcgagcgtgagatctcgctcagtcgctccgaagagaaactggtcgagatgaccaacggctgcatctgctgcaccctgcgagaggatcttctctccgagatcagtgccttggccgccgatggccgattcgactacctactcatcgaatcttcgggcatctccgaaccgctgcccgtcgcagagacgttcacattcatcgataccgacggccacgccctcgccgacgtcgcccgactcgacaccatggtcaccgtcgtcgacggccacagttttctgcgcgactacacggctgggggccgcgtcgaagccgatgccccggaagacgaacgagacatcgcggatctgcttgtcgatcagatcgaatttgccgacgtcatcctggtgagcaaggccgatctcgtctcgcaccagcacctggtcgaattgaccgcagtcctgcgctctttgaacgcatccgctgcgatagttccgatgacgctcggtcgcatcccactcgacacgattctcgacaccggtttgttctcactcgaaaaggctgcacaggcccccggatggttacaagaactccaaggtgaacacatccccgaaaccgaagagtacggaatcagttcggtggtgtaccgcgagcgcgcacccttccacccccaacggctgcatgatttcctcagcagcgagtggaccaacggaaagttacttcgggccaagggctactactggaatgccggccggttcaccgagatcgggagtatttctcaggccggtcatctcattcgccacggatacgtcggccgttggtggaagtttctaccccgtgacgagtggccggccgacgattaccgtcgtgacggaatcctcgacaagtgggaagaacccgtcggagactgccgacaagaactcgtcttcatcggccaatccatcgacccgtctcgactgcaccgagaactcgacgcgtgtctactcaccacagccgagatcgaactcgggccagacgtgtggaccacctggagcgaccccctgggcgtcggctataccgaccagaccgtttga

SEQ ID NO: 8268 - protein, 399 aa, Rhodococcus globerulus
MVDTRLPVTVLSGFLGAGKTTLLNEILRNREGRRVAVIVNDMSEINIDSAEVEREISLSRSEEKLVEMTNGCICCTLREDLLSEISALAADGRFDYLLIESSGISEPLPVAETFTFIDTDGHALADVARLDTMVTVVDGHSFLRDYTAGGRVEADAPEDERDIADLLVDQIEFADVILVSKADLVSHQHLVELTAVLRSLNASAAIVPMTLGRIPLDTILDTGLFSLEKAAQAPGWLQELQGEHIPETEEYGISSVVYRERAPFHPQRLHDFLSSEWTNGKLLRAKGYYWNAGRFTEIGSISQAGHLIRHGYVGRWWKFLPRDEWPADDYRRDGILDKWEEPVGDCRQELVFIGQSIDPSRLHRELDACLLTTAEIELGPDVWTTWSDPLGVGYTDQTV

SEQ ID NO: 8269 - DNA, 1695 bp, Plasmodium yoelii yoelii
  CDS (1)..(1695)
  misc_feature (1667)..(1667): m is a or c
atgatcggaataacgatcatcacaggattcttaggggcagggaaaactaccctccttaaaaatttacttaaagatagtttaaaaaataaattaaagattgcaataatacataatgagtttacagaaaataataataacattgataaaatagttttcaaggatataaatgatatatataattttccaaaatcattcgaaagcgaaaaaaaaccaactgatgtagatgataaaattgaaactttagaaattgtaaacaaaattgaaaacaaagatggctttatatacgaattaaataacggttgtttatgttgttccaataaaagcaattttgtaaaattaatagaaatgattttagaaaaaaaaacagtatatgattttatttttgtcgaagtctctggaatttatgataatgtagaaataaataacttattatggatagataaattaaataaatcgaaaatatatttggatagtataattcacataattgattcttacaatttcatgagatatactaacaacaatataacatattatgaccatttaaaggggaactccgcaaatgtaaatcatggcgacccaaatgaggaacatacatatattagcaacaaattagaaccgattaaagaggatggtatagagaattctgattgcaaacaactaattgtgtgtgatgttattataataaataaaatagacaaaataaatgataaagaaaaagaagatataaaaaagtttgttgaaaatataaatccattaagtgtaatacacatgacaagctattcaaatgttccaattgaattaataacaaatttaaaatgttatgaacaaaataattttaaaggtgctttagtaaacattgataataataactcaaatataaaacataaaaatggtgtatatcactataacaattttataaatttttcaattcagtttcaacatgatatatcttatttaatttatttaagcaaaaatttaaatgacttaaaacaaaagtttataaatacaaaagattctgatattttaaaaaatataatttctttaaaaaaaaaaaatattttttcctacaaaaaaattaataatttattagcatcacttttgtggaatacggaaatgaatatttatagagggaaaggaatatttatcgcatttaatgatgatatatatacaaataaaaataaacttaaattaaatatttattattatcaaagtgttggagagttatacgaaataaatactgtcatgacagatattcatcatttttttcagaattattttgacaatttacaaaaaaaaaatactcactcaaactgtacttcatcatttgatgctgcgcatgataaagaaaggggagtaataaataaagaaaggggagtaataaataaagaaaacggtgtgataaataaagaaaacggtgtaagtagtaaagaaaatgaagtatgtgacgaatccggtgtatgcacttcagaacattcggtagatgtcgaggattatctgtcttgcgattcatctgacactaatgattctgaatataacatatttaacattttgaacgattccaacatttttgagtcaaattttttatttataggtcgtttattgaatatgcacacaataaatagctacatttcaaaaaaaaaaaaaaaaaaaaaaaaatatataamcaataaatatatggtaaaatatgtataa

SEQ ID NO: 8270 - protein, 564 aa, Plasmodium yoelii yoelii
  Variant (556)..(556): Xaa in position 556 is Asn or Thr
MIGITIITGFLGAGKTTLLKNLLKDSLKNKLKIAIIHNEFTENNNNIDKIVFKDINDIYNFPKSFESEKKPTDVDDKIETLEIVNKIENKDGFIYELNNGCLCCSNKSNFVKLIEMILEKKTVYDFIFVEVSGIYDNVEINNLLWIDKLNKSKIYLDSIIHIIDSYNFMRYTNNNITYYDHLKGNSANVNHGDPNEEHTYISNKLEPIKEDGIENSDCKQLIVCDVIIINKIDKINDKEKEDIKKFVENINPLSVIHMTSYSNVPIELITNLKCYEQNNFKGALVNIDNNNSNIKHKNGVYHYNNFINFSIQFQHDISYLIYLSKNLNDLKQKFINTKDSDILKNIISLKKKNIFSYKKINNLLASLLWNTEMNIYRGKGIFIAFNDDIYTNKNKLKLNIYYYQSVGELYEINTVMTDIHHFFQNYFDNLQKKNTHSNCTSSFDAAHDKERGVINKERGVINKENGVINKENGVSSKENEVCDESGVCTSEHSVDVEDYLSCDSSDTNDSEYNIFNILNDSNIFESNFLFIGRLLNMHTINSYISKKKKKKKKYIXNKYMVKYV

SEQ ID NO: 8271 - DNA, 1299 bp, Solanum bulbocastanum
  CDS (1)..(1299)
atggctactctcagatacttgctctccaaatcatcaacgcctctaaaactcagcaatcctttccatcttcatcgttctaacaacttccctcacatttcccaattcctaggagctcttaactcttttgtttctagagaattccattgccattcacctaattctagaagtttctccacttctcctgagtacgtcgcccaagattctgattcttccattgcagccgctttgagtcttgatagtcgggttccggccactgttattactggttttcttggctctggaaagactactctgttgaatcatatactgacatcgcagcatgggaagcggattgctgtaattgaaaatgagtttggtgaggtggacattgatggctcattggttgctagtcattcttcatctaacgaggaaattctcatggttaataatggttgtctatgctgtactgtacgcggtgaccttgttaagatgcttttggagctcgttaagaataggagagacagatttgatcacatagttatagagacaacaggtcttgcaaagcctggtccagttattgaaacattttgttctgatgaattggtttcaagacatgtcaaacttgatggagttgtcacattggttgattgcaagcacgccttgcaacatttaaatagggtaaaacccagatttgtgtcgaatgaggctgttgaacaagtggcttatgcagatcgtattattttgaacaagatagacttggtaacggaatctgagctcgaattgttaacaaagagaatcaagcatatcaatggaatggcacaaataaagagagcaaagcatggggtggttgatatggactttgttttgggagttggtggctatgatcttgacagagttgattctgaagttcaatcagagggctcccactgtgggcacaaacatgaagatgggcatgaacatcacaagggccaccatcatgatcatgtacatgattctgctgtatccagtgttagtattgtgtccgagggaaccttagatttggatgaggttgatgattggcttgaaagactgattgaagagaatggggatgacctgtacaggatgaaaggggttttatctgtgagcgattctgaacaacgctatgttttccaggttctcatcaatttcgtctttgtgggggtacattccattttagatggatgcccaggcaagacatgggaaccaaatgagaagagaataaacaagttagtattcataggcagaaacctagatgaaactgcactaagaaaaggtttcaaaggctgcttatgtgaggaatag

SEQ ID NO: 8272 - protein, 432 aa, Solanum bulbocastanum
MATLRYLLSKSSTPLKLSNPFHLHRSNNFPHISQFLGALNSFVSREFHCHSPNSRSFSTSPEYVAQDSDSSIAAALSLDSRVPATVITGFLGSGKTTLLNHILTSQHGKRIAVIENEFGEVDIDGSLVASHSSSNEEILMVNNGCLCCTVRGDLVKMLLELVKNRRDRFDHIVIETTGLAKPGPVIETFCSDELVSRHVKLDGVVTLVDCKHALQHLNRVKPRFVSNEAVEQVAYADRIILNKIDLVTESELELLTKRIKHINGMAQIKRAKHGVVDMDFVLGVGGYDLDRVDSEVQSEGSHCGHKHEDGHEHHKGHHHDHVHDSAVSSVSIVSEGTLDLDEVDDWLERLIEENGDDLYRMKGVLSVSDSEQRYVFQVLINFVFVGVHSILDGCPGKTWEPNEKRINKLVFIGRNLDETALRKGFKGCLCEE

SEQ ID NO: 8273 - DNA, 1080 bp, Homo sapiens
  CDS (1)..(1080)
atgtatttcaaacgtgccgctcgggcctttcccgtattgctcactggtgctgggaagacaacacttctgaactatattttgacagagcaacatagtaaaagagtagcggtcattttaaatgaatttggggaaggaagtgcgctggagaaatccttagctgtcagccaaggtggagagctctatgaagagtggctggaacttagaaacggttgcctctgctgttcagtgaaggacagtggccttagagctattgagaatttgatgcaaaagaaggggaaatttgattacatactgttagagaccactggattagcagaccctggtgcagtggcttctatgttttgggttgatgctgaattagggagtgatatttatcttgatggtatcataactattgtggattcaaaatatggattaaaacatttaacagaagagaaacctgatggccttatcaatgaagctactagacaagttgctttggcagatgccattctcattaataaaacagacctggttccagaagaagatgtaaagaaattaagaacgacaattagatccataaatggactaggacaaatcttagaaacacaaagatcaagagttgatctctctaatgtattagatcttcatgcctttgatagtctctctggaataagtttgcagaaaaaacttcagcatgtgccaggaacacaacctcaccttgatcagagtattgttacaatcacatttgaagtaccaggaaatgcaaaggaagaacatcttaatatgtttattcagaatctcctgtgggaaaagaatgtgagaaacaaggacaatcactgcatggaggtcataaggctgaagggattggtgtcaatcaaagacaaatcacaacaagtgattgtccagggtgtccatgagctctatgatctggaggagactccagtgagctggaaggatgacactgagagaacaaatcgattggtcctccttggcagaaatttagataaggatatccttaaacagctgtttatagctactgtgacagaaacagaaaagcagtggacaacacgtttccaagaagatcaagtttgtacataa

SEQ ID NO: 8274 - protein, 359 aa, Homo sapiens
MYFKRAARAFPVLLTGAGKTTLLNYILTEQHSKRVAVILNEFGEGSALEKSLAVSQGGELYEEWLELRNGCLCCSVKDSGLRAIENLMQKKGKFDYILLETTGLADPGAVASMFWVDAELGSDIYLDGIITIVDSKYGLKHLTEEKPDGLINEATRQVALADAILINKTDLVPEEDVKKLRTTIRSINGLGQILETQRSRVDLSNVLDLHAFDSLSGISLQKKLQHVPGTQPHLDQSIVTITFEVPGNAKEEHLNMFIQNLLWEKNVRNKDNHCMEVIRLKGLVSIKDKSQQVIVQGVHELYDLEETPVSWKDDTERTNRLVLLGRNLDKDILKQLFIATVTETEKQWTTRFQEDQVCT

SEQ ID NO: 8275 - DNA, 1200 bp, Rhodococcus erythropolis
  CDS (1)..(1200): transl_table=11
atggtcgacacacgacttccggtcacggtgctgtcaggtttcctgggcgccgggaagacgacgctactcaacgagatcctgcgcaatcgggagggccgtcgggttgcggtgatcgtcaacgacatgagcgaaatcaacatcgacagtgcagaagtcgagcgtgagatctcgctcagtcgctccgaggagaaactggtcgagatgaccaacggctgcatctgctgcactctgcgagaggatcttctttccgagatcagcgccctggccgctgctggccgattcgactaccttctcatcgaatcttcgggcatctccgaaccgctgcccgtcgcggagacgttcaccttcatcgataccgacggccacgctctggccgacgtcgcccgactcgacaccatggtcaccgtggtcgacggcaacagttttctgcgcgactacacggctggaggtcgcgtcgaagccgatgctccggaagatgaacgagacatcgcggatctacttgtcgaccagatcgagtttgccgacgtcatcctggtgagcaaggccgatctgatctcgcaccagcacctggtcgaattgaccgcggtcctgcgatctttgaacgcaaccgctgcgattgttccgatgacgctcggtcgcatcccactcgacacgattctcgacaccggtttgttctcgctcgagaaagctgcacaggcccccggatggttacaagaactacaaggtgaacacactcccgaaaccgaagagtacggaatcagttcggtggtgtaccgcgagcgcgcacccttccacccccaacgtctgcatgacttcctcagcagcgagtggaccaacggaaagttactccgggccaagggctactactggaatgccggccggttcaccgagatcgggagtatttcccaggccggtcatctcattcgccacggatacgtcggccgttggtggaagtttctaccccgtgacgagtggccggccgacgattaccgccgcgacggaatcctcgacaagtgggaagaacctgtcggtgactgccgacaggaactcgtcttcatcggccaagccatcgacccgtctctactgcaccgagaactcgacgcgtgtctactcaccacagccgagatcgaactcgggccagacgtgtggaccacctggagcgaccccctgggtgccgggtataccgaccagaccgtttga

SEQ ID NO: 8276 - protein, 399 aa, Rhodococcus erythropolis
MVDTRLPVTVLSGFLGAGKTTLLNEILRNREGRRVAVIVNDMSEINIDSAEVEREISLSRSEEKLVEMTNGCICCTLREDLLSEISALAAAGRFDYLLIESSGISEPLPVAETFTFIDTDGHALADVARLDTMVTVVDGNSFLRDYTAGGRVEADAPEDERDIADLLVDQIEFADVILVSKADLISHQHLVELTAVLRSLNATAAIVPMTLGRIPLDTILDTGLFSLEKAAQAPGWLQELQGEHTPETEEYGISSVVYRERAPFHPQRLHDFLSSEWTNGKLLRAKGYYWNAGRFTEIGSISQAGHLIRHGYVGRWWKFLPRDEWPADDYRRDGILDKWEEPVGDCRQELVFIGQAIDPSLLHRELDACLLTTAEIELGPDVWTTWSDPLGAGYTDQTV

SEQ ID NO: 8277 - DNA, 993 bp, Xenorhabdus nematophilus
  CDS (1)..(993): transl_table=11
atgcaaccaatatcagtgacaattctgaccggttttctgggttcaggcaaaacaacgctgctgcgtcatattctcaaggccaatcatggttataaaatcgccgttattgaaaacgaatttggcgaggttccgattgaccatgagttgattggtgatcgggcaactcagatcaagacattaagcaatgggtgtatttgctgtagccgttcaaatgaattggaagatgccttgctggatttactggatagcatggataaaggggaaatttattttgaccgcctgattattgaatgtaccggtatggcggatcccggcccgattacacaaactttcttttcccatgaagtcctgtgccagcgctttttattggatggcattatcacattggtggatgctgcccatgctgagcaacagttggatcgcttttccattgcacaagctcagataggctatgctgataaaattctcctgacgaaaacagatattgttccggctcatgatgccctgattgaccgtttacagcgaatcaatgccagagcacctattcataaagttattcagggtcatgctgatttaagtatcttgttcaatattgaaggatttatactgaatgataagctgactgtatcgacaccgatcttccggtttgctcctgaacaattgacctctgcacaattgacctttgaaaaacaaaacattattcggtcaattattgttaacttgccacaccccgttgagctatccgacatttctgacgtaatggaagcgttgttactgagttttgccgataatttattgcgttacaaaggcatactggccattaaagatgactctcgccgattgctgtttcaaggggtacagcgcctgtatagtgcggactgggacagagaatggcgtactgatgagagacgtgagagtgtattggtttttattggtatggatctgcctgaacagaatatccgtgagaaatttgccgcgttgtttgtggaatag

SEQ ID NO: 8278 - protein, 330 aa, Xenorhabdus nematophilus
MQPISVTILTGFLGSGKTTLLRHILKANHGYKIAVIENEFGEVPIDHELIGDRATQIKTLSNGCICCSRSNELEDALLDLLDSMDKGEIYFDRLIIECTGMADPGPITQTFFSHEVLCQRFLLDGIITLVDAAHAEQQLDRFSIAQAQIGYADKILLTKTDIVPAHDALIDRLQRINARAPIHKVIQGHADLSILFNIEGFILNDKLTVSTPIFRFAPEQLTSAQLTFEKQNIIRSIIVNLPHPVELSDISDVMEALLLSFADNLLRYKGILAIKDDSRRLLFQGVQRLYSADWDREWRTDERRESVLVFIGMDLPEQNIREKFAALFVE

SEQ ID NO: 8279 - DNA, 1188 bp, Homo sapiens
  CDS (1)..(1188)
atgttaccggctgttggatctgcggatgaggaggaggatcctgcggaggaggattgtcctgaattggttcccattgagacgacgcaaagcgaggaggaggaaaagtctggcctcggcgccaagatcccagtcacaattatcaccgggtatttaggtgctgggaagacaacacttctgaactatattttgacagagcaacatagtaaaagagtagcggtcattttaaatgaatttggggaaggaagtgcgctggagaaatccttagctgtcagccaaggtggagagctctatgaagagtggctggaacttagaaacggttgcctctgctgttcagtgaaggacagtggccttagagctattgagaatttgatgcaaaagaaggggaaatttgattacatactgttagagaccactggattagcagaccctggtgcagtggcttctatgttttgggttgatgctgaattagggagtgatatttatcttgatggtatcataactattgtggattcaaaatatggattaaaacatttaacagaagagaaacctgatggccttatcaatgaagctactagacaagttgctttggcagatgccattctcattaataaaacagacctggttccagaagaagatgtaaagaaattaagaacgacaattagatccataaatggactaggacaaatcttagaaacacaaagatcaagagttgatctctctaatgtattagatcttcatgcctttgatagtctctctggaataagtttgcagaaaaaacttcagcatgtgccaggaacacaacctcaccttgatcagagtattgttacaatcacatttgaagtaccaggaaatgcaaaggaagaacatcttaatatgtttattcagaatctcctgtgggaaaagaatgtgagaaacaaggacaatcactgcatggaggtcataaggctgaagggattggtgtcaatcaaagacaaatcacaacaagtgattgtccagggtgtccatgagctctatgatctggaggagactccagtgagctggaaggatgacactgagagaacaaatcgattggtcctccttggcagaaatttagataaggatatccttaaacagctgtttatagctactgtgacagaaacagaaaagcagtggacaacacgtttccaagaagatcaagtttgtacataa

SEQ ID NO: 8280 - protein, 395 aa, Homo sapiens
MLPAVGSADEEEDPAEEDCPELVPIETTQSEEEEKSGLGAKIPVTIITGYLGAGKTTLLNYILTEQHSKRVAVILNEFGEGSALEKSLAVSQGGELYEEWLELRNGCLCCSVKDSGLRAIENLMQKKGKFDYILLETTGLADPGAVASMFWVDAELGSDIYLDGIITIVDSKYGLKHLTEEKPDGLINEATRQVALADAILINKTDLVPEEDVKKLRTTIRSINGLGQILETQRSRVDLSNVLDLHAFDSLSGISLQKKLQHVPGTQPHLDQSIVTITFEVPGNAKEEHLNMFIQNLLWEKNVRNKDNHCMEVIRLKGLVSIKDKSQQVIVQGVHELYDLEETPVSWKDDTERTNRLVLLGRNLDKDILKQLFIATVTETEKQWTTRFQEDQVCT

SEQ ID NO: 8281 - DNA, 1131 bp, Homo sapiens
  CDS (1)..(1131)
atgttaccggctgttggatctgcggatgaggaggaggatcctgcggaggaggattgtcctgaattggttcccatggagacgacgcaaagcgaggaggaggaaaagtctggcctcggcgccaagatcccagtcacaattatcaccgggtatttaggtgctgggaagacaacacttctgaactatattttgacagagcaacatagtaaaagagtagcggtcattttaaatgaatttggggaaggaagtgcgctggagaaatccttagctgtcagccaaggtggagagctctatgaagagtggctggaacttagaaacggttgcctctgctgttcagtgaaggacagtggccttagagctattgagaatttgatgcaaaagaaggggaaatttgattacatactgttagagaccactggattagcagaccctggtgcagtggcttctatgttttgggttgatgctgaattagggagtgatatttatcttgatggtatcataactattgtggattcaaaatatggattaaaacatttaacagaagagaaacctgatggccttatcaatgaagctactagacaagttgctttggcagatgccattctcattaataaaacagacctggttccagaagaagatgtaaagaaattaagaacgacaattagatccataaatggactaggacaaatcttagaaacacaaagaataagtttgcagaaaaaacttcagcatgtgccaggaacacaacctcaccttgatcagagtattgttacaatcacatttgaagtaccaggaaatgcaaaggaagaacatcttaatatgtttattcagaatctcctgtgggaaaagaatgtgagaaacaaggacaatcactgcatggaggtcataaggctgaagggattggtgtcaatcaaagacaaatcacaacaagtgattgtccagggtgtccatgagctctatgatctggaggagactccagtgagctggaaggatgacactgagagaacaaatcgattggtcctccttggcagaaatttagataaggatatccttaaacagctgtttatagctactgtgacagaaacagaaaagcagtggacaacacatttcaaagaagatcaagtttgtacataa

SEQ ID NO: 8282 - protein, 376 aa, Homo sapiens [sequence omitted]

SEQ ID NO: 8283 - DNA, 1344 bp, Burkholderia pseudomallei
  CDS (1)..(1344): transl_table=11
atgaaccagccgttgcccgtcaccgtgctgtccggcttcctcggcgccggcaagaccacgctgctcaatcacatcctcgcgaatcgcgcgggcatgaaggtcgccgtgatcgtcaacgatctcgccgcggccaacgtcgacgcgacattcgtgcgcggcgcgaccgagctgtcgcatgtcgaagcgcacctcgtcgagatgtcgaacggctgcatctgctgcacgctgcgcgacgatctgctcgtcgagatccgccgcctcgcggccgaaaaccgcttcgacgcgatacgtggtcgaatcgacgggcattcgccgagccgatgccgatacgccgagaccttcacgttcgtcgacgacgacggctccacgatcgccgacgttgcgcgtctcgatacgatggtcaccgtcatcgacgcgttcaacttcctgcacgactatgcgcgcgacgacgcgctcgcggagcacggcctcgcggcgaccgacgaagacgaccgcacgctcgtcgagctgctgatcgagcagatcgagttttgcgacgtgctcgtgatcaacaaggcggatctcgtcgacgccgacgcgctcgcgcgcctgcagcggatcctcgcgaacctgaatccgcgcgcgcagcagatcgtgagccgcttcggcgacgtgccgctcgccgaagtgatcaataccggccgcttcgatttcgacgcggccgcgaacgcgccgggctggctcgcgtcgctcgagcatcggcgcgacgccgatgaagccgaatgcggccaaggccaaagccaaggcgacggccgcgtgcacagcgaggccgacgaatacggcatcggccacttcgtctatcgcgcgcgccggccgttccatccgcaacggctctgggcgctcctgcacgaagagtggaagggcgtgctgcgcagcaaggggtttttctggctcgcgacgcgcaacgacatcgcgggttcgctgtcgcaggcgggcggcgtgtgccggcacggtccggccggccactggtgggcggcgcaggatcgcaccgaatggccggaggcgggcgacgagctgtacgacgagatcgtcgccgactggcacggcgagctcgccgacacgtcgatcggcgatcggcgccaggagctcgtactgatcggcatcgggctcgatgcggcggcgtggcgcgcgaagttcgacgcgtgcctgctcaccggcgcggagtacgcgcaaggcaagcaggcgtgggcgggctacgcggatccgttcccggcatgggacgtcgatgatcacgatcacgaccatgcgcatgaccaccatgatcacgaccacggcgacgactcggaaatcgtccaccgccactga

SEQ ID NO: 8284 - protein, 447 aa, Burkholderia pseudomallei
MNQPLPVTVLSGFLGAGKTTLLNHILANRAGMKVAVIVNDLAAANVDATFVRGATELSHVEAHLVEMSNGCICCTLRDDLLVEIRRLAAENRFDAIRGRIDGHSPSRCRYAETFTFVDDDGSTIADVARLDTMVTVIDAFNFLHDYARDDALAEHGLAATDEDDRTLVELLIEQIEFCDVLVINKADLVDADALARLQRILANLNPRAQQIVSRFGDVPLAEVINTGRFDFDAAANAPGWLASLEHRRDADEAECGQGQSQGDGRVHSEADEYGIGHFVYRARRPFHPQRLWALLHEEWKGVLRSKGFFWLATRNDIAGSLSQAGGVCRHGPAGHWWAAQDRTEWPEAGDELYDEIVADWHGELADTSIGDRRQELVLIGIGLDAAAWRAKFDACLLTGAEYAQGKQAWAGYADPFPAWDVDDHDHDHAHDHHDHDHGDDSEIVHRH

SEQ ID NO: 8285 - DNA, 1260 bp, Pseudomonas chlororaphis
  CDS (1)..(1260): transl_table=11
atgattgaaggcgcccaggcgggccgactgccggtgacggtcctttccggcttcctcggcgccggcaaaaccaccctgctcaacgctatcctgcgaaatcgccaaggactgcgggtcgcggtcatcgtcaacgacatgagcgaagtcaacctcgatgccgaatcggtgcagcgcgacgtctcgctgcaccgtggccgcgatgagttgatcgagatgagcaatggctgcatttgctgcaccctgcgcgccgacctgctggaacagatcagtgacctggcacgtcagcagcgcttcgattacctgcttatcgaatccacggggatctccgaaccgatgccggtcgcggagaccttcgccttcctcgacaccgaaggcttcagcctcagcgagctggcacgccttgatacactggtgacggtggtcgatggcagccaatttcaggcgctgctggaatcgacggataccgttgcccgcgccgacaccgaggcgcacacgtccacgcgtcacctggcggatcttctgatcgaacaggtggagtacgccaacgtcattctggtcaacaagcgggacctgatcgacgagcccggctaccaggcagtgcatgcgatcctcgctggcctcaacccgagcgcgcggatcatgccgatggctcacgggaacgtcgcgctgtccagcctcctcgacacccatctgtttgatttacccagcctcgcagcctcgccgggctggatgcgtaaaatggaagctaccgatacgccggcctcggagtcggatacctatggcgtgacatcctgggtctaccgggagcgcgcgccttttcacccccagcgcttgctcgagtttctacagaagccctggcacaacggtcgcttgttgcgcagcaaaggttacttctggctcgccagccgccacctggaaatcggcctgctggcgcaaagcggcaagcagttccagtgggattatgtcgggcgctggtggaacttcatcgagccatcgcaatggccgcgggacgaatatcggttgcagggcatcatggccaagtgggacagcgttgtcggcgactgccgacaggagctggtcttcatcggccaggggctcgacacccgcgtcttgcagcgcgaactcgaccattgtttgctgagtgcccaggaaatagccgccggcccactggcctggcaggccctgccggcggcgacggcctttgacaccgaggccttatcggcacgccccacgccccccatggcggttcaaccgacttga

SEQ ID NO: 8286 - protein, 419 aa, Pseudomonas chlororaphis
MIEGAQAGRLPVTVLSGFLGAGKTTLLNAILRNRQGLRVAVIVNDMSEVNLDAESVQRDVSLHRGRDELIEMSNGCICCTLRADLLEQISDLARQQRFDYLLIESTGISEPMPVAETFAFLDTEGFSLSELARLDTLVTVVDGSQFQALLESTDTVARADTEAHTSTRHLADLLIEQVEYANVILVNKRDLIDEPGYQAVHAILAGLNPSARIMPMAHGNVALSSLLDTHLFDLPSLAASPGWMRKMEATDTPASESDTYGVTSWVYRERAPFHPQRLLEFLQKPWHNGRLLRSKGYFWLASRHLEIGLLAQSGKQFQWDYVGRWWNFIEPSQWPRDEYRLQGIMAKWDSVVGDCRQELVFIGQGLDTRVLQRELDHCLLSAQEIAAGPLAWQALPAATAFDTEALSARPTPPMAVQPT

SEQ ID NO: 8287 - DNA, 987 bp, Escherichia coli
  CDS (1)..(987): transl_table=11
gtgaccaggaccaacctcatcaccggttttctcggcagcgggaaaaccacgtcgattcttcatctgttagcccataaagatcccaacgaaaaatgggcggtactggttaatgaatttggggaagtcggaattgatggtgctttgctcgccgatagcggcgcattgctgaaagagatccccggcggctgcatgtgctgcgttaatggtttacccatgcaggtagggttgaataccttactgcgtcagggaaaaccagaccgcttgttgatagagccgaccgggctgggccatccgaaacagatcctcgatctgttaaccgcaccagtctatgaaccgtggatagatctgcgcgccaccttgtgcattctcgatccgcgcttgctgctggacgaaaaaagcgccagcaatgaaaacttccgtgaccagctggctgccgcagacatcattgtcgccaataaatccgaccgtacgacgcccgaaagtgagcaagcgctacagcgttggtggcagcaaaatggtggcgatcgacaattaattcacagtgagcatgggaaagttgacggtcatcttctggatttgccgcgtcgcaatttagccgagttgcccgccagcgccgcgcattctcatcagcatgtcgtgaaaaaagggttagcagcgttaagcctgccagagcatcaacgctggcgtcgcagtctgaacagcgggcaaggatatcaggcctgcggctggatattcgacgctgatacggtattcgacaccattggcattctggaatgggcgcgacttgcaccggtggaacgcgtcaaaggcgtgctgcgtattcccgaagggctggtgcgaatcaaccgtcagggcgatgacctgcacattgaaacgcaaaacgttgcgccaccggacagccgtattgagctgatttccagcagcgaagctgactggaatgccttgcagagcgcgctgttgaagcttcgtttagcgactaccgcgtaa

SEQ ID NO: 8288 - protein, 328 aa, Escherichia coli
MTRTNLITGFLGSGKTTSILHLLAHKDPNEKWAVLVNEFGEVGIDGALLADSGALLKEIPGGCMCCVNGLPMQVGLNTLLRQGKPDRLLIEPTGLGHPKQILDLLTAPVYEPWIDLRATLCILDPRLLLDEKSASNENFRDQLAAADIIVANKSDRTTPESEQALQRWWQQNGGDRQLIHSEHGKVDGHLLDLPRRNLAELPASAAHSHQHVVKKGLAALSLPEHQRWRRSLNSGQGYQACGWIFDADTVFDTIGILEWARLAPVERVKGVLRIPEGLVRINRQGDDLHIETQNVAPPDSRIELISSSEADWNALQSALLKLRLATTA

SEQ ID NO: 8289 - DNA, 1566 bp, Brassica napus
  CDS (31)..(1398)
cgattgattcatcactacctttcactaaaaatggctacgctatcaaagctagagatggccacgaccttcctcgctttcacctctcctcgttccgccaccgccctgaactaccgcttctcttctgccgccgtcccgattttctcttggcgcatagctacgcccgtttccgtcagggcgaaaccgtcgttgctctatcccccggtggttaattccaaacgacttcgaaaattctcctccgtttcggcctcagcttccgcgtcggcgccaccgcaaacagacgattccgatgttacaactaagattccgccggacaaccgaattccagctactataatcacggggtttctgggctccggcaagacgacattactgaaccatatactgactagagatcatgggaagcgcatagccgtgatcgagaatgagtttggtgaagttgacattgacgggtcacttgttgcttccaaatctgtgggagcggaggatatagtgatgctcaacaatggctgcctgtgttgcactgttaggggtgatcttgtgaggatgatttctgagttggttaacaagaagaaagggaagttcgatcatatcgtgatagagacaacagggctggcaaacccggctccgattatccaaaccttttatgcggaggaggagattttcaatgatgtcaaactggacggtgttgttactcttgttgatgctaagcatgctcgtttgcatcttgatgaggtcaaacccaaaggtgttgtcaacgaggctgttgaacagatagcctatgctgaccgtatcatagttaataagactgatcttgtcggtgagtcagagttaggttcagtggtgcaacgcataaagacaataaacagcatggctcagatgacgaggacaaattacggaaacgttgacttggactatgttcttggaattggaggttttgatctagagagaatcgaaagctctgtgaccaccgaagatgataagaaaggtcatgatgagtgtcacgacgaacatcaccatgatcacgaccatcatcatcatgatcaccatcaccacaatgaacatgagcataatcattctcatgatcatgatcatacccatgatcccggtgtttcttcagtcagtatagtttgcgaagggagcttagaccttgacaaggcaaacatgtggctagggacgttactgatggaacgaagtgaggatatttacaggatgaaaggtctgctgtcggtccacaccatggaggagagattcgtgtttcaaggagtccatgacatctttcaaggatccccagaccggttatggggaaaagacgaggctagagtcaacaagatggtcttcattggcaagaatttgaaccgggaggagctagagaagggttttaaagcttgcttgatttgaattctctaagcattacaattcaaacccatccctatttctgccagatgttgtatcctattgtcctaaaagtacatcatctatttcacttatagttctgtttttgtaacactgatttatctattataaaatgtgaaaactattataattcgatccaaaaaaaaaaaaaaa

SEQ ID NO: 8290 - protein, 455 aa, Brassica napus
MATLSKLEMATTFLAFTSPRSATALNYRFSSAAVPIFSWRIATPVSVRAKPSLLYPPVVNSKRLRKFSSVSASASASAPPQTDDSDVTTKIPPDNRIPATIITGFLGSGKTTLLNHILTRDHGKRIAVIENEFGEVDIDGSLVASKSVGAEDIVMLNNGCLCCTVRGDLVRMISELVNKKKGKFDHIVIETTGLANPAPIIQTFYAEEEIFNDVKLDGVVTLVDAKHARLHLDEVKPKGVVNEAVEQIAYADRIIVNKTDLVGESELGSVVQRIKTINSMAQMTRTNYGNVDLDYVLGIGGFDLERIESSVTTEDDKKGHDECHDEHHHDHDHHHHDHHHHNEHEHNHSHDHDHTHDPGVSSVSIVCEGSLDLDKANMWLGTLLMERSEDIYRMKGLLSVHTMEERFVFQGVHDIFQGSPDRLWGKDEARVNKMVFIGKNLNREELEKGFKACLI

SEQ ID NO: 8291 - DNA, 1560 bp, Triticum aestivum
  CDS (54)..(1154)
caaaatcccaaacctagcaaccaaaaggcgaagctctcgagctctcggcggctatggaggacgacgacgagtgccctcccctcgccgtcgagctccctccgcagacgacctctcctctggtccccgcttccgcccccgcctccgcctccgcgccggtcggcgtcaccgtcatcaccggctacctcggcgccggcaagtccacgttagtcaactacattttgagtggacaacatgggaaaagaatagcggtaatactgaatgagttcggagaggaaattggagtagaaagagcaatgatcaatgaggggcaaggtggtgccattgttgaggaatgggtggagctagcaaatggatgcgtttgttgcactgtaaaacacagcctggttcaagcacttgagcaacttgtgcagactaaggagagaatggatcatatattattggagacaactggtttggctgatcctgcaccacttgtatccattctctggctggacgatcaattggagtcatcaatcagactagactctatcattacggttattgatgcaaaaaacttcaggcggcaaattgatgaacacacgaactcttcgtcatttcctgaagcatttcaccaaatcgcatttgcggatgttgtgatattaaacaaaattgatttagtaaaagacaatctcgaggatttggaaaggcaaattcatgatgtcaatgcgcttgttacagtggtgcggtctgtgcggtgccaggttgacttaaatacaatatttgatcgacaggcatatggtgtgaagaattcatcacaactacaggagcttctggagtacagtaaatcagcaccacctaatagtcgccatgataacagtatttccactttgtgcatttatgaacaggatccagtttgcttgactaaggtggaatcatggcttgaagatcttctttgggagaagaaatccaacatggatatatatcgttgcaaagggattttgaatatccatgattcaaaccaacttcatacattacaggcagtgagggaagtctatgaggttgtgccggctcgagaatggtcggagacacaatctcgcatgaacaagatagttttcataggccgtgatttggatatcagtacccttcaagattcatttagtcgctgcaagcactgattatcgaatgatttgcacccaccttgtacctgtgtcattgaatacttgatggaggctcacgctgcctggattgagattagggtgttctcgtatggttccccgaagctacattctgttgaacaatcttcagtagaggcgaagcagtttgcagtgccgagatcaagagacgacttcaactgctgctatgaagttatgtgccacgggagcacctccctgatacactagaaaggcattacgctgagcatttgtatatgttcagtatagcaaatgcaactgtgttaggttttgcagagggaaaatgtatccagtcgtaagaggatgtgatatccaaatatggtgcagaaagacctaagtcggccaacaccataatctcaacggaagatgcctctggaaaaaaaaaaaaaaa

SEQ ID NO: 8292 - protein, 366 aa, Triticum aestivum
MEDDDECPPLAVELPPQTTSPLVPASAPASASAPVGVTVITGYLGAGKSTLVNYILSGQHGKRIAVILNEFGEEIGVERAMINEGQGGAIVEEWVELANGCVCCTVKHSLVQALEQLVQTKERMDHILLETTGLADPAPLVSILWLDDQLESSIRLDSIITVIDAKNFRRQIDEHTNSSSFPEAFHQIAFADVVILNKIDLVKDNLEDLERQIHDVNALVTVVRSVRCQVDLNTIFDRQAYGVKNSSQLQELLEYSKSAPPNSRHDNSISTLCIYEQDPVCLTKVESWLEDLLWEKKSNMDIYRCKGILNIHDSNQLHTLQAVREVYEVVPAREWSETQSRMNKIVFIGRDLDISTLQDSFSRCKH

SEQ ID NO: 8293 - DNA, 957 bp, Zea mays
  CDS (1)..(957)
atggaggacgacgatgactgccctcctctcgccgttgagctccctccgcgggtgccgtcccctccagagcaatctccctcagacgcctcgccagttggcgtcaccgtcatcaccggctacctcggggctggcaagtcgacgctagtcaactacattctgaatgagcaacatgggaagagaattgccgtgatactaaatgagtttggagaggaaattggggtcgagagggcgatgatcaatgaggggcaaggtggtgcacttatcgaggaatgggtggagctggccaatggatgtgtctgttgctctgtaaaacacagtctggttcaagcacttgagcagcttgtgcagagaaaggatagaatggatcatatattacttgagacaacagggttggccgatcctgctccacttgtttctgttctttggctagacgatcaattggagtcgtcaattgtgctggattctattattacggttattgatgcaaaaaacttcagggttcagattgacgagcacaaaaactcttcctcattccctgaagcatttcatcaaattgcatttgcggatgttgtgatattgaacaaaattgacctagtggaagacagtcttgaggatctggaaaaacatattcgtgatgtgaatgctctggttacagtggtgcggtccgtccgttgccaggttgacttgaatgaagtatttaaccggcaagcatatggtgccaaggtggagtcttggcttgaagatcttctttgggaaaagaaatctattatggacatatatcgctgtaaagggattttatatatccatgattcagaccaagttcatacattacaggcagtgagggaggtctatgaagttgtgccggctcgaaaatggtctgagacagagtctcgcatgaacaagatagttgtcataggccgcaatctggatatcaatgtacttcaagattctttttag

SEQ ID NO: 8294 - protein, 318 aa, Zea mays
MEDDDDCPPLAVELPPRVPSPPEQSPSDASPVGVTVITGYLGAGKSTLVNYILNEQHGKRIAVILNEFGEEIGVERAMINEGQGGALIEEWVELANGCVCCSVKHSLVQALEQLVQRKDRMDHILLETTGLADPAPLVSVLWLDDQLESSIVLDSIITVIDAKNFRVQIDEHKNSSSFPEAFHQIAFADVVILNKIDLVEDSLEDLEKHIRDVNALVTVVRSVRCQVDLNEVFNRQAYGAKVESWLEDLLWEKKSIMDIYRCKGILYIHDSDQVHTLQAVREVYEVVPARKWSETESRMNKIVVIGRNLDINVLQDSF

SEQ ID NO: 8295 - DNA, 25 bp, Artificial Sequence
  Primer
atgtctgcattgagaaacatcaagt

SEQ ID NO: 8296 - DNA, 25 bp, Artificial Sequence
  Primer
tcattccagggttttacgtaacagt

SEQ ID NO: 8297 - protein, 675 aa, Artificial sequence
  Variant (2)..(5): Xaa in position 2 to 5 is any amino acid
  Variant (6)..(6): Xaa in position 6 is any or no amino acid
  Variant (8)..(8): Xaa in position 8 is any amino acid
  Variant (11)..(11): Xaa in position 11 is any amino acid
  Variant (18)..(20): Xaa in position 18 to 20 is any amino acid
  Variant (22)..(27): Xaa in position 22 to 27 is any amino acid
  Variant (28)..(31): Xaa in position 28 to 31 is any or no amino acid
  Variant (34)..(35): Xaa in position 34 to 35 is any amino acid
  Variant (37)..(43): Xaa in position 37 to 43 is any amino acid
  Variant (44)..(45): Xaa in position 44 to 45 is any or no amino acid
  Variant (47)..(60): Xaa in position 47 to 60 is any amino acid
  Variant (61)..(103): Xaa in position 61 to 103 is any or no amino acid
  Variant (106)..(106): Xaa in position 106 is any amino acid
  Variant (109)..(111): Xaa in position 109 to 111 is any amino acid
  Variant (112)..(133): Xaa in position 112 to 133 is any or no amino acid
  Variant (135)..(138): Xaa in position 135 to 138 is any amino acid
  Variant (140)..(141): Xaa in position 140 to 141 is any amino acid
  Variant (143)..(145): Xaa in position 143 to 145 is any amino acid
  Variant (147)..(163): Xaa in position 147 to 163 is any amino acid
  Variant (164)..(181): Xaa in position 164 to 181 is any or no amino acid
  Variant (183)..(186): Xaa in position 183 to 186 is any amino acid
  Variant (187)..(268): Xaa in position 187 to 268 is any or no amino acid
  Variant (270)..(273): Xaa in position 270 to 273 is any amino acid
  Variant (275)..(279): Xaa in position 275 to 279 is any amino acid
  Variant (281)..(281): Xaa in position 281 is any amino acid
  Variant (283)..(285): Xaa in position 283 to 285 is any amino acid
  Variant (286)..(520): Xaa in position 286 to 520 is any or no amino acid
  Variant (522)..(522): Xaa in position 522 is any amino acid
  Variant (525)..(557): Xaa in position 525 to 557 is any amino acid
  Variant (558)..(674): Xaa in position 558 to 674 is any or no amino acid
PXXXXXGXLGXGKTTLLXXXLXXXXXXXXXXAVXXNXXXXXXXXXDXXXXXXXXXXXXXXXXXXXXXXXXXXXXXXXXXXXXXXXXXXXXXXXXXXXXXXXXXGCXCCXXXXXXXXXXXXXXXXXXXXXXXXXDXXXXEXXGXXXPXXXXXXXXXXXXXXXXXXXXXXXXXXXXXXXXXXXDXXXXXXXXXXXXXXXXXXXXXXXXXXXXXXXXXXXXXXXXXXXXXXXXXXXXXXXXXXXXXXXXXXXXXXXXXXXXXXXXXXXXXXQXXXXDXXXXXKXDXXXXXXXXXXXXXXXXXXXXXXXXXXXXXXXXXXXXXXXXXXXXXXXXXXXXXXXXXXXXXXXXXXXXXXXXXXXXXXXXXXXXXXXXXXXXXXXXXXXXXXXXXXXXXXXXXXXXXXXXXXXXXXXXXXXXXXXXXXXXXXXXXXXXXXXXXXXXXXXXXXXXXXXXXXXXXXXXXXXXXXXXXXXXXXXXXXXXXXXXXXXXXXXXXXXXXXXXXXXXXXXXXXXXXXXXXXXXXXRXKGXXXXXXXXXXXXXXXXXXXXXXXXXXXXXXXXXXXXXXXXXXXXXXXXXXXXXXXXXXXXXXXXXXXXXXXXXXXXXXXXXXXXXXXXXXXXXXXXXXXXXXXXXXXXXXXXXXXXXXXXXXXXXXXXXXXXXXXXXXXXXXXXXXXXXXI

SEQ ID NO: 8298 - DNA, 38 bp, Artificial sequence
  cloning cassette sequence
ttgctcttccatggcaatgattaattaacgaagagcaa

SEQ ID NO: 8299 - DNA, 38 bp, Artificial sequence
  cloning cassette sequence
ggaattccagctgaccaccatggcaattcccggggatc

SEQ ID NO: 8300 - DNA, 38 bp, Artificial sequence; identical to SEQ ID NO: 8298
  cloning cassette sequence
